United States Patent Application Publication US 2019/0085377 A1 - sequence listing, part 3

SEQ ID NO: 1 - DNA, 4876219 bp, Salmonella enterica subsp. enterica serovar Typhimurium str. 798 (residues 3,250,815-4,876,219 of 4,876,219)
tcgccgatatccaggatctgctcgtcttctttcacgtcgttaacggatttcagagtcgccggtgcggtttcggagaactcggtggcaacgcgaacatcggtcggaaccgggatatcgcaagtggtcagcagacgttttgcttcgtcaaccaggtcagcttcgtacagggatttaccgacgctgtggccctgagcggcaacgaaggtgttggcgataccgccgccgacaatcagctggtcagcgattttagacagggaatccagaacggtcagtttggtagatactttagaaccaccaacgatagccaccatcggacgagccggttctttcagcgctttacccagcgcatccagttcagcggccagcagcgggcctgcgcacgcaacatcagcaaatttgccgataccgtgggtagaagcctgcgcgcggtgcgcagtaccaaaggcgtccatcacgaatacgtcacacagggcggcgtattttttagacagcgcttcgtcgtctttcttttcgcctttgttaaagcgaacgttttccagaaccaccagctcaccttcggccacgtcaacgccgtccaggtaatctttgaccaggcgaaccgggttagacagtttgtctttcaggtagttaacaaccggcagcagagagaattcttcgttgtactcgccttcggtaggacgacccaggtgggaagttaccatcactttcgcgccctgtttcagagccagttcgatggtcggcagagaagcgcggatacgcgcgtcgctggtcactttcccttctttaacaggtacgttcagatccgcacggataaaaacgcgtttcccggccagatccagatcggtcatcttaattacagacatggtgaatcctctcaatgatgcttaaagttttgtcgacgctgacgcgtcgagcctgaaaccaactgcggccatcgctaacgtggtgtcgagcatcctgttagcaaagccccattcattatcgcaccagaccagcgtcttgatcaggtgggcgccactgacccgggtttgcgtgccatcaacaatggcgctgtgcgggtcgtggttaaaatctatcgagaccaacggtgattccgtatagtcaactataccatgaaatgcaccttgtgctgctttttgcagcaactggttgacttcactggcttttactggttttttcaccgttacgcttaaatcgatcgccgtcacattaatggttggaacgcgcaccgcaatcgcctcaaaacggtcgttaaactgcgggaatatacgcgtaatgcctgccgccagttttgtatctaccgggataatcgactggctggccgcgcgcgtgcgccgtagatcggagtgatacgcgtcgatcacctgctgatcgttcatcgcagagtggatcgtcgtgacggtaccagactcgatgccgtaagcatcatccaacaatttaatgacgggaattatgcaattcgtggtacaggacgcgtttgagacaatacgatgttccgcacgcagttggttctggttcacgccaaaaacgacggtggcgtcaagatcgttgctgcccggatgagaaaagagcactttcttcgcgccagcggcaatatgcgcctcgccatgctcccggttgccatatacgcccgtacaatccaacacaacatccacgcccagttcgcgccacggcagatccgccagcgttctttcatgcagaatacgaatgacatcgtcaccgacaaaaagctgctcgcgctcgtggcgaacctcccatgcaaaacgcccgtggctggtatcgtatttcaacaaatgcgccatgcctgcggcatccgccagctcgttgatggccaccacggtaatttccgcgcgacgtccggattcatacaaagcacgaaccacgttacgcccgatgcgaccaaagccattaatcgctatgcgtacggtcataggtctcctgcaaggctatcccgattcagatgaggctgacagagtaatgcagctcatcgtcgagtaaaacctcacctgtcgcaaactgcgactgattggttaattgtcgaacatttaattaactgaaacgcttcagctagaataagcgaaacggggaataaaaggaatgtttgtccagtcgaagaagacagttatctgacctgcatcacatttcatggccgcttacgctgcaatttattccatatttaagaatcaccagtacatccgtcagatcttttcatcgtcgcgtcacaaatactgatttatatcagaaagcgctgtcgccagcgtctatattatcagcgccacgtccgagtctcggagtcctgtaacgatgactgtatctcaccacaatgcctctacagcgcgcttttacgcgcttcgtctgcttcccggccaggaagtgttttcccaattacacgcctttgtgcaacagaaccaattacgtgccgcctggatagcagggtgtaccggcagtctgaccgatgttgcgctgcgttatgccgggcaagaggcgaccacatcgctcaccggcacgtttgaagttatctcgctaaacggcacgcttgaattgaccggcgagcatctgcatctcgcggtatcggatccctacggggttatgctcggcggccatatgatgccagggtgtaccgtgcgtaccacgctggaactggttatcggcgagctgccagcgctgacgttcagccgtcaaccgtgcgccatttccggttatgacgaactgcatatttcttcccgttaattgacgactctttaagaggtactttatggcgcgtcgcccgttttccagccagtccctggtgctgattgtcatcgctattgccatcaatatgattggcggacagcttattagcatgttgaagctgcctatttttctcgactcgatcggcaccttaattagcgcggtgctgttagggccgttcatcggcatgttgactgggcttctaaccaacttgctgtgggggctgcttaccgatcctatcgctgccgcgtttgccccggtagcgatggttatcggtctggtcgccgggtggctggcgcgcgcaggctggtttcgtaccctgcccaaagtgatcgtcagcggggtcgtcattacgttagcggtgacgctggtcgccgtaccgcttcgtaccgcgctttttggcggcgttaccggcagcggcgctgatttattcgtcgcctggatgcattcaatgggccaaaacctggtggagtcggtcgcgattaccgtcataggcgctaatctggtcgataaaattctgacggcgatcatcgtttgggtgctgctgcgtcagctaccgttacgtacgacacggcattttcctgcgatgtcagccgtacgctaaatgcatccgtttacctcgttaaccttatgggcgctggcggcctgcaccacgctgctactccctgcgcagaccgtgctcccggtttatagcgcggcggccttcctctgtctgctggcgctgaaatcaacgcggcggcgggcgaagtatgtcgcctggctgatgctgtctttagggtttgggctatggctggtacatggcggttggctaacggaatggataagcgggcagcctcgcgatccgcagcgctgggtatatgccgttacgctatggctacgtctgctggcgatcgtgtcgacgtcgcagctatggatgcagtatgtgccggttcagcggtttattcgcgccctgttcgcttcacgtctgccgcccggcatcgcttacctgttcgctggccctctgctggtcgtcgaacagctcaaacgacaactgacgatcgttcatgaagcccagcgcgcgcgtggcgtaccgctggatgaaggctggtatcagcggctacgggcaatgcctgcgctgatcgtgccgcttacgcaaaatgcgcttaacgatctgacaatacgcggcgcggcgttggatatgcgggggtttcggctgcatcgagcccgaaccacgctgtgggcgccgaaagatagcgtgttacaacgggttgcgcggtatggcatggtactgctaatactggcggaagcgggagtatggatatggttacgttagagcagtttcgttatcttccgtccgatgcgacacgcccgccggcatgttttgatttccactattcaacacccggaatagtggcgatagtcggcgataacggcagcggaaaaagtacgctggcgcaactgatggctggctggtatccggattatctccccggtgatattgacggcacaggcttactgcttggcgtccctatcgggcggctcccgctggtagaacagtcgcccaccatccaattggtgcagcaatcgccttatttacagctttccggctgtacctttagcgtagaggaagaggtggcgtttggcccggagaatctcggcctccatgaagcggagattctacggcgcattgacgaggcgctgaccctgacaaactgccagtcgttacgccatcgccatcccggcacgctctccggcggcgaaacgcagcgggtagtaattgccagcgcgcttgccatgcagcccagactgttaattcttgatgaagccttcagtcggctgacgtcagcggccaccgggatgctgctggaacggttacaacagtgggcgctggaacgtcattctctcattgtgctttttgagcgtaatcattttccttttctgacgcgatgccagcgggtatggcaattgcgcgacggagcgctaaccccattatgttgacgttaaatcaggtcgcttatcgctggccggatgccgcagccgactgtttgcacgctatctcgcttaaacttcgtgacggcgaatggctggcgttgaccggcgataacggcgcgggaaaatcaacgctgttacggattatggccggcctgctttcccccgcttccggctcggtaacgcttaatggagagccgattgcgcagcttaaaaatcgtcaacgcgccgccgctatcggcgtactctttcaggaagcggaaaaccagattttccacagcaatgtcgcgcaagaggtcgcttttgggctgaaactacaacgcttatcggcggaggaaatttcacggcgcacgcaggccgcgctgcggttatgccagctaacggacgtcgccgaggcacacccgcttgatctgcacgccgcacagcgccggatggtggcggtcgccagtctggaggcgatagcgccgcctgtgttattgctggatgaacccagccgggattttgacgcccactggctaaccgtatttgaacactggctggcgacatgccgggcacggggaaccagcgtcgtcgcgattagccatgacgctgcgtttacccggcgtcatttttcacgggtggtacggctggaaaacggcaggttgtcaaagggagaataaaaaacgggtcgccgaagcgacccgttttatgccgtattaaggattacagcagtgctttcgctttggcgatcacgttgtccaccgtgaagccaaactcttcaaacaacagctctgccggagcagactcaccgaaggtggtcatcccgacaatagcgccgttcaggccgacgtatttgaaccagtagtcagcgatacccgcttcaatcgccacacgcgcagagaccgccttcggcagcacggattcacggtaagccgcatcctgcttgtcgaacgcgtcggtggacggcatggaaaccacgcgcgccttcacgccttcggcagtcagtttttcgtaagcggcaaccgccagctcaacctctgaaccggtcgcaatgaagataatctgcggctggcccgcacaatctttcagtacgtaaccaccgcgggcgatattcgccagttgctcttcagtacgttcctgctgcgccaggttctgacgggagaggatcagcgcggttgggccatcctgacgctctacgccatatttccacgccaccgcggattccacctggtcgcacggacgccatgtggacatgttcggcgttacgcgcaggcttgccacctgctcgaccggctggtgcgtcgggccatcttcgcccagaccgatggagtcgtgggtgtacaccatcacctgacgttgtttcatcaacgctgccatacgcactgcgttacgggcatattcgacgaacatcaggaaggtggaggtgtacggcaggaaaccgccgtgcagggcgataccgttggcgatagcggtcataccgaattcgcgcacaccgtaatgaatgtagttacctgcggcatcttcgttaatcgctttcgaaccggaccacagggtcaggttagaaggagccaggtcagcggagccgccgaggaattccggcaacagcggaccgaaggcttcgatggtattctgggacgctttacggctggcgattttggatggattcgcctgcagtttagcgatgaactcattcgctttcgcatcgaagtcagccggcatgtcgcctttcatacgacgagtgaattcagcagcttcctgcgggaaggctttctcataagccgcgaatttctcattccatgcagactctttcgcctggccggcttctttcgcatcccactgggcgtagatttcagacgggatttcgaacggcgcgtatttccagcccaactgttcgcgggtcagcgcgatttccgcgtcgcccagcggcgcgccgtgggaatcgtgggtaccctgtttgttcggcgaaccgaaaccgatgatggttttgcacatcagcagggacggtttgtcagtcacggcgcgagcttcttccgtggcgcgtttaatggcgtcggcatcgtgaccgtcaatgccacggataacgtgccagccgtaggcttcaaaacgtttcgcggtgtcatcggtgaaccagccttcaacatgaccatcgatagagataccgttgtcatcatagaacgcgatcagtttgcccagtttcagagtaccagccagagagcacacttcgtgagaaatgccttccatcatgcagccgtcgcccataaagacgtaggtgaagtggtcaacgatatcgtggccaggacgattaaactgcgccgccagagttttctcggcaatcgccatcccgacggcgttggcaataccctgacccagcgggccagtagtggtttcaacgccagcggtgtagcccacttccgggtgaccaggggtttttgaatgtagctgacggaaattctgcagctcggacatcggcaggtcataaccggtgaggtgcagcaggctgtaaatcagcattgagccgtggccattggacagcacgaagcggtcgcggtcggcccaggacgggttggtcgggttgtggttcaggaaatcacgccacaggacttcggcaatgtcagccatacccatcggggcacccgggtgaccggacttggctttctgtactgcgtccatgctcagcgcacgaatagcattggcaagctctttacgtgaggacattttgactccagatcggatgttgaaaggccatgcccgtaacgacttgacgacagcgcgttttgggctacgccggaaaatttgccaacaatttaccccaagccgcgcgtcatgtacatggaacatccttttaccgcttcagaaatctccggatcatgctcgtatgttgcgcaattagctaacttgcctgccatgcttttctttatacttaacccaggcgctaattcatctgcaacgggcgcatttcaaaataatattgattcgtatggaagagaaaaatgaaaattcgcgctttactgcttgctttgggcatggcgacggtgctgaccggttgccagaatatggactctaatggactgctttcttcgggcgctgaagcttttcaggcctatacgttaagcgatgcgcaggtaaaagcgttgagcgatcaatcctgtcaagagctcgacagtaaagcgaaaatcgcgccggcgagcagcgaatacactaaacgactggcaaaaattgccgccgcgctgggggataacattaacggccagccggtgaactataaggtttacgagacgaaagacgtcaacgcgtttgccatggcgaacggttgtatccgcgtctacagcggactgatggatatgatgaccgacaacgaagttgaagccgtgatcggccatgaaatgggccatgtcgcgctgggtcatgtaaagaaagggatgcaggtcgcgctgggcactaacgccgttcgtgttgcggcggcatcggcaggaggcgtagtcggcagcctgtcgcaatcacagcttggcgatcttggcgaaaaactggtgaactcgcagttctctcagcgtcaggagtccgaagcggatgattattcttacgatctgttgcgcaaacgcggtatcagtccggcaggactcgccaccagctttgagaaactggcaaaactggaagcgggtcgtcaaagctcgatgttcgacgatcacccggcgtccgccgcacgcgcacagcatgtgcgcgatcgtatgagcgcggacgggatcaaataatccccgaacagtgccggatggcggcgtgaacgccttatccggcctacaagcatcaatcagctgtaggccggataagcgcagcgccatccggcaaaacaacttactcgcccttcttcgccgcctggatatagagcatttctaatgccagcgtcgcggccgccagagcggtgatctccgactgatcgtaagccggcgcgacttccactacatccataccgacaatgttcagatctttcagaccgcgtaccagtttaatggcgcgatcggaggtcaaaccgccgatcaccggcgtaccggtgccaggcgcaaacgccgggtccagacagtcgatatcaaaggtcagatagaccggcatatcgccgacgatctgtttcacctgagcgagaatatcatccacgccgcgatcgttgacctggcaggcatccagcacggtaaagccattgtctttgtcaaactcagtacgaataccgatctgtaccgaatgatgcggatcgatcaggccttctttcggcgcggtgtagaacatcgtgccgtgatcgaattcgcagccgttagcgtaggtatcggtatgcgcatcaaaatgtaccagcgccattttgccaaaatgtttcgcgtgggcgcgcagcagcggcagcgtgacgaagtggtcgccgccgaaagagagcatacgcttgcctgcagacagcagtttttcagcgtgcgcctgtaatttttcgctcatttcacgggcatcgccaaacgcatacaccaaatcgccgcagtccacgacgttcaggcgctcgcgcatgtcaaaattccacgggaaacggtgatgttcccaggcaaggttggtcgacacctgacggatcgccgccgggccatgacggccgccagcgcgaccggacgttgccatatcaaacggtacgccagtgatcacccagtcggcatcgctgtcatacggctggaagttcattggcagacgtaaaaaaccaaacgcattagaaaccagtgagttatcgtactgatgacctaaggtgctcatggcaaaaacctcttcttagtcaatataaaaaaaccctcccgcgtcgttaggcccgacgaggaagggtttgaatttgtttacggctcaaagtttactctgacagaccgcattattgaagtcagtttagccaggtacagtagacaacgcccgaaaaaaatatatatccagcgcaaatcagtaggctcatacgtccatcgcggtcagttaagaggccttagggatttgccgctgtaaaaactcaagcactaatgcgtaaaacagcggtgtttttcctggcgtctggaaaatggcgtgaccgctaccgggaatgagggtcatctccgcctgaggcagcagccggtacagctcggtaacttcttcaacggtgaaaaattcatcccggtcgccgtccagtaatagcacaggaatgtggatttttttcacctcttcttccgccagcgatgtgggcgttgtccacattggccagacacctttgaggaacgtgcgccagtagtctttttgctctggatgatgcatgttctgataaaatttaaccatcccgggcgcatccgaagccattttatccagatcgcgatccgtcaattgcccctgaggcattcctttaccataaaaaatttccatcccctgcatgtaatgggtcgtagcaaagcgatgcgttgcgccgccgacgatagcagcgcgcgctagatccgggtatcggctggttaacttcagaacgaccatgccgccatcgctgtaacccatcaccagcggtttttccagcttcagcgctttaacaaaagccgccatatcttccgtcatcagatcatagctaaacgttccttgcgggttattggttaatccatgtccacgactgtccggcatgatgacgcgaaaatatcgagatgcctctttcgctaatccctgccaacttttcgccgtcagaccaccaccgtgaatcaacagcagcggaggcccctcgccctcttcaacgtaatgaattttgataccattcgcttccacaaatttatctttgtccatcgttgttgctgaagcatttattaaaaatataatattgataataaaaataaatgctaatttaaaaatatgattcataacacctcgccaatcactttccgtgtaaaagaccatattattcagattgaacaaaaataacatcaaaatcgatttgtatcattttcacttatttaccggggagaccccgcatcctctttttacagaacgtaaaaagcctttccgcgattaaccccaacgcgaaaaggctctgaagtcagaaaagtgccaccttattcattctggctgtaattcaggatgacttgaaggtctcttcctgaattgcatttagcgctttctttattccttcgcctgacaagactagcttgactcgctaaatgccgtggccggaattttcacaatcgcttttttaaccggcgcaggtttaccacgcgtacaaagcggacggtggacctggttgggataaaaaagcgcgaaatcgccaggatttaatgtaacgaactgctcattagcgacacattcaggaaagatgatgtcatcaggaagatgctcaagctcctttatcctggtatcaattttgttggaatagccaatctcctcataaccgcttagtaaaatctgaacatcgatatattttttatgaagttcagctttgcggtttaacgaagagtgtgtttctccttcgcttatcataagaaatgactccgggaaagaaagttcatatctaccagcaggctgatcttcagctatcttcaccgcttcgatgataagttttttaataatgtggttaacgtaaggtaataaagtaagctgctctatatttccatatagcatactatagttatcctaaataatggtcgtgattataattatcagccaatcaggtactggtaaataccttcagccacaggaataccttcttttaaacatttttctttataggcgatttgcggatcgtttggcgccagcactttatcaacaccgggcatcggttttacagcccttagctcattgaccattgtgctcattattgaggaaaacagcggattgcccaacatctgcggatcaataacgataaccagactcgctaacttgcgcatcttgtcatagtcgccatacatccgaacaatatggttgctaaagtttgcccccatcaggacgcccgtgagcgcatcaatcgccagggcaataccagaacctttgtgtccgccaaagggcagcagattttcaattttatgcggatcggtagtgatatgtccctctttatccagcgccagaccatgacctattggtttcccggtttctttggcgtgcagaattttaccaaacgcaatggcgctggtcgccatatcgacgatcatcggatggctgtctttaacggggaagccgaaggcgattgggttagtccccagaaagcgctccgcgccgccatacggcgcaacacaggtatccgtttgcgtcatggcgatagccaccattccctggcttgtcgcctgctcaatgaaccacgagagcgcgccgcagtgggacgtatttttgacgctgacgaaacccagccccgtctctctcgccagactaatagcgtgatctgtcgcctttatcagcgcgcagtgtcccattccatcatcagagtccagaatagcgactgaaggcgaaatctgttcgatgctgaatgttgcttttggattgagcccgcctgcgttcaggcgggtacaatagtgctctacgcgaataacgccgtgggagtgaacgccggtaatatcggcatgaaccaaaacgtcggctacctgctgcgccgtttgcgcgtcaagacccgcctgggtgagtttattaaacgccagcgctttcaattcattttctttgactaatattgttgacataactatcccgctattaaaatttgataacgcctttaaccaattttttgttttctaccacgttcttctggtactggttgccgaacgtatagaaatcgaattcctggtttttcatcattgtttcgctaatagcgccctgagccattagctcaatgacacattcgaagtcttcccgcgtcgcgttacggctgctcaatagcgtggtctcttttttatggaaggtcggatcgtcaatgacgagctcgccgatatacagcccgatgaagacgatttttccgccgtgacgaatcagatcgacagcgcggctcatggaggatttattgccggtggcatcaagcacagtgccggctaattcaccggagaaacaggctttcagcgcatcaatatagtcgtctgacgacggatcgagcgttgcaacgcctaccttttcggcgaccagacgacggcgttcggcgtcaatatcagctaccgcgacgcgagcgcctttggcttttgctatcgcggcggcggccagcccaatcggcccggcgccgaccaccacaatgttttgctgcggcttcacgtcagcgcggcgtactgcatgggcgctgatggcgaaacactcaaccagcgcgcccgcgctgtcagtgaggttatccgacagttcaaccagattttgttcacgaacggccagatattcgctaaagccgccgtcctggtgaacaccatacagcgagacgttctcacagcagttggtttttccttcccggcaggctgcgcaagcgccgcaaggaatacagggaataacgctatagcgttggccgaccttcgccgtgctgcacgatttacctaacatttcagccacgccgcaaatttcatgacccagcacgcgcggataggcaaaaaagggctggcgaccggcaaacgcatggatatcggtgccgcaaataccaaccgctttaatttttaacagtacttcatcgtcttttaaatgaggaatatccctttcaatgtattcgatatttcccggattattacagataagcgttttcatacttaaccctttgaagataaacggtgaatggtggccgtgacgccatgtaattcaatatggttaaaggcctgctgaatgttgtttaaaaagtctgcgttgtcgctggccagcgttccaaagatgctatttatctgcagcaaagacagcgcttgttcccatcgcgtgtttttatttttaatagccgcattgaaggtatcattgagcgggtcggccacgctctgcccctgagagagcgtattaatgacgtaatggagccagcccgcaatcagcgtcgctaacgccctgcccttaacaccgcgcgcctggagcgtcagataaggatcgacggcccgctgaggcagcttctgagaaccgtccatcgcaatctgtccggtcttatgtttaatattcgggttgctgaatcgatcaatgagcaactgcgcatattgatgtacatctaccgccaaattcgggcgcagcgattttgcctgctcttccgtcattaaatgatgtacggcggttttaaaagcgtcgtcttccatgcactgatagataaactcatatccggccaggctgccgttataggcgagaaacgaatggctgccattcagcatacgaagtttcatttcttcatagggaagcacgtccgagacgaacatcgcccctgctttatcccagtcaggacgaccggcaacgaaattatcttcgataacccactgacggaaatcctcgcatacgatgccgcagggatcggcaaaaccgatctggtctttaatcatgtcaaattgctctggcgtcattgccggcacgatgcgatcgaccatggtgccaggaaaggtgacatgcttcgctatccaggccgccagttgcggatcgagattatcggcaaacgtaacgatcgccgttttggtcaaatgaccgttttccggaatgttatcgcacgacagtacactaaacgggggaagcccttgctggcggcgtatccgtagcgcttcgacgatcagtccgagtgctgaccggggatgttcaggatcggcaagatcgtgtttgatgagcggatggctgagatcgagcgttctggaccgtggatcggtgcagtaacctttttccgttatcgtcaacgaaacaatttttacctgcggctcagtcagcttctcgatcgccgcctgaatacctgacttcggcgtatgcaacgcgccggtgatggtacgaaccaggcgactattgatggcgctggctgacgtttccaccactgaaaacagcccctgttgcgcatttagcgcatccaccagctccgcatcgccgaacagattcagttcaaaaatcccccagcggttgccggttatctcattcgtgagatcgttataaacagcctgatgaccacggtgaaaggcgccaaatccaatatgtacgatgttggcttccattccctgacgtgaataagtcgttttgaattggtgccttgcggcgtctaactggcgagctatggtgtccatgaatttttcccactcctgttttgtttaccaattctgcttaaacaccataccaaaatccgtgaatatgatcacactcatggcaccagattctttaccatggtatgctgactaatagccaacgaataaaaataatttatttatcaattagttataaaaagcacttctcaggataaattttacgattcacaaaagcgtgattttgattagaaaaatcggccacaaattggcataccacccatacaacccgtaatcattaaaccacatgaaaaacaatatcttattgaataacacgcccgctgcaagtgtatatgtcacgcatgattggttcaataatcacccgaaatacagcaaaccaaacctgataatttgtctagtgaattaatgaactcaatttattatcagcatcaacattaacctaagaacatcagttacggttttgatcatccgggtcgctgctaaagcgatgaggagtgagccgcctttagacgtaattggcaaattaatccattgatttaaaacaggaaaaaattgatgaagacgcggattaggcacgttgaaacaaagctttcaaagcccctctggccgaggtcttagttgacgtgaaacatggcataatagccatttcgaactggtaaccacgacgattacgctggaagacggttcaactggcaccggatatacctataccggcggaaagggagggtatgcaattaaagcgatgatcgaccacgatcttgccccggtactgtcagggaaagaggcgctgcgattgacgatatctatgactttatggaatagcatattcactatgtgggttgcggaggcatcgcgtcgtttgcgatgtctgcgatgtctgcggtggatatcgccctttgggatttgaaaggcaaacgtgaaaaactgccgctgtggaaaatggctggttgaaggcggcgcgtctgtcgacgaatagcggtcgtttggtatgctcgctcggtatgcaggaattacacgtcagactggtttccgcattcgagactggctgactggaggttcacagtttcccaatcgatcaatataccaaacatccgctggtggtcgacaattatcgcgccgtggcaccggacacctacggcattggcgtagagtttgactgggataagctgagcgtttacgaagcctgattccctctctccgggcttgtttttggcggcaggcccggttaatcgctgacaaaaatgtcatccgcctgaaaatagccgtcaggtggcgaagaaaaaatcatcaaaatcttccagcgaatcatcctgttggaagatttttaccagctcatttttactgttttcaagatgggtccacgaagcctgtctggcctgctcagcatcgcgtttttgcaatgcaaggaagatactacggtgatcttccacccatttcattcttaactctttcttatgtaaatacttatagtttaactgcttccagcgcggattttcggtcctgacagcccgccacagctcggcagattgtttcattaatacacgattttgcgtggattccgcgatgatattgtggaactggcgatccagttcttcaaatttgtcgctgtcgccgccaatctgcttttcctgctgctcaataatacgtttaagctgcttaagttcattaaatctgatttgcgtagcggcaaaaccggtgatgttactttcgatgacctgccgggcctgtagcaattcaaaggggccaatgtctgagtaaggcaagagcgctttttgattgattttttccagactatcaataaagtaagtgcctgcgccttgcttaacctctaccactcccttcagctcaagcataataatcgcctcacgaatcgtcgtgcggctggtttgaaaacgctcgctgagttctctctccgccggaagtcgctcgccagctttaaatacccctgaatagagtagttcttctatttgcagccctatatcaaaatagcgccgcttggttaaaatttgttccatgcacatacctatgtagacagcaattgctccacttgagggtagtgtaaacaaatcctaatgtttatggtaaacaatttccctgccagagagtggtcgtttctttcccgcaacctacggctatgcgcgtcacacagtccttccccaccagactcggcaggaaaggtgctgattcccataacgcatatttgacgtttgatgccgggtttatttgcggcagggcggcggcgcatacccgttgttgtccgccgggaaagcctgcgaggaacaaggcggtagcgtatttgttgctttaccctgcaatgcaaaagcggcaaagccgatgacgccgatgttgcgtacatcgccctgcgcggagtgggccgcataagcgtcagctacgtcggcgaactggaatgccgcctcagtgtgtttatctttgcgaaaccctttaatcgccagtgaatcgccggcgttaacaatatagccatgatgattcagcgagcctgcttttccgttcaacacgtccaggccatcaaccgttgcgacgatttcgtaattggtatcatgactgtaattacgaatatataactgatagttcatccctgatcttgcaggaatactatattgccattgtcccattgatgcgttgtagcgacgagtaattggaatcgaattaaaattagcgtcgcgcacagcatattcaagatcgctgatacgtatactataaactttatcgtaacctgacggatattgagtggagtaatttattatcaccatttcggcaggttctcgatcggcacgttctaccgaaacgctttgtaccgatgaatgcacgtcgccgccccaagcggtgccgacgtcggatgaagagccattattagattgcattccgctggaacaaccgcctaacagcaaaaacaagccaacaatgacggcattaaatttaaatttgctcatactcacccccctttttaattattagggggattgtaggcccataagattacatagagaagcgacgcgctgataattaagaatttataaaatataaaagggtcgatttaaataattaaatcgacccacaagtggaatactcttaattactcatcttcaagataagtataaccgtacagtcccgcttcaaattcctcaaggaactgctgctgcaacgcatcgtccagatccgtctgttttacctggtcgcggaaatgcattaacagcgttttcggatccagttgcacatattgcagcatatccgcaacggtatcgccttcgtccgacagttcaacctcgacgctaccatccgggaagacaaacacgtcaaccgcttcagtatcgccaaacaggttgtgcatgttaccgaggatctcctgataggcgccgaccataaagaagccgagcatcggtggattctctggatcgtattccggcatcggcatcgtcgtggcgataccgtcgccatcgatatagtggtcgatagcgccatcggaatcacaggtaatatccagcagcacggcacgacgttccggtacctgatctaacccttccagcggcagcaccgggaagagctgatcgattccccacgcgtccggcattgactggaacagcgagaagttgacgtacattttgtccgccattcgctcttgcagttcgtcgataatcggacgatgcgcacggttttgcgggtccagttgcttctgcacttcatggcacatgctgagataaagttgctccgcccaggcgcgctcctgcaaactaaacgcgccggaagagtagccgatatgaatatcgtgcagatccatttggctatcatgcagccattcacgcagcgagcggcgagtgccaggcttatgcatctcctgccaggtttcccacagattttgcagcgcacgcggcgcatcttcagcaggggcagtcggatccgtgtattcgttacgctccacgccgataatgttagagaccagtaccgtatggtgcgcagtgacggcgcggccagactcggtaatcaccgtcggatgcggtaaaccatgctcttcgcaggcatcgccaatcgcccagatgatgttattggcatattcgttcaggccatagttcaccgaacagtcggactgcgagcgggtaccttcataatccacgcccagaccgccgcccacgtcgaagcactggatattcacgcccagcttatgcagctcaacatagaaacgcgcggactcgcgcacgccggtcgcgatatcgcgaatgttcgccatctgcgatcccaggtggaagtgcaacagttgcagactgtccagacgcccggcgtcacgcagggtctccaccagttgcagcacctgcgtcgccgccaggccgaattttgatttttcgccgccggaggattgccacttaccggacccctgagaggccagacgcgcacgtacgcccagacgaggaaccacgttcaggcgctcggcttcttccagcacaatcgcgatttcagacatcttttcgatgaccagataaaccttatggcccatcttctcgccaatcaacgccagccgaatgtattcacggtctttataaccattacagacgattacgctacgggtcatgccggcatgcgccagcaccgccatcaattccgcttttgaccccgcttccagccccaacggttcaccggaatggataagggactcgatcacgcggcgatgctgattgaccttaatcggataaacgaggaagtagtcgccgttataaccgtaagattcacgcgcacgcttaaacgccgcgttaattgaacgcaaacggtgttgcaggatctgcgggaagcaaaacagcgccggcagacgctgaccttgcgcttcgcgcgctttcaccagtttggcaagatcgacacgcgcttccggtacgtcgggatcggggcatacgctaatatggcccagctcgttgacgtcgtagtagttattgccccaccaggcaatattgtaagtgcgcagcatcttgctggcttcctgggagctcattgcaacctcctgcatggagcgtagtacaccctgttcgcctgctgacgaaggcgaacccatagacatgtcgtcagacatagcgaacctcaatttttattagcaagtgtaaaacagttgactactatcgcaatccgaagacgcgataacaacccatagacaagcggattttccagcagatagcgctgatgctccgcctgcgcgaccggtttctttttcatatcattgtaaacacgtaaccgaactcacagataacggttcggcgaaaccacgagaaaactcttgcgttaacaagagcgcccttgttcagtcttcagcgccattgccggctctggaatcctgagaagcgccgagatgggtataacatcggcaggtatgcaaagcagagatgcagattgcgggggacatgcgcgcaccagaacgatgcgacagattcagcagaatacaacggttcattatctcgtatcacctccacggccgcctcgtaagacgaacccacaagccaaagcaacgttttaacccggctggaagtggcgacacgaagaaaacgtcgtgtgcttttgtatgagccgcgcgtcgcgttttatacccagaacgcagaaaaaaagcaaagcataaatgcgcataatgtcagcattatcagaaacgtttaccgcctgattttgaccgacattgcgacggccttcaaaaaaagctggaaattgggcgaagaagtgacctaaaatagccgtccagatgttaatccatccatactgattaacactcagactgccagtgtcagcaaccttcagactcatggtagaatcttctgtcatgactattccgcacaacagtttgagctaactaaattctccttaggtgaaattaaatatggcaaaacacctttttacgtctgagtccgtatcagaagggcatcctgacaaaatcgcagaccaaatctctgatgccgtgttggacgctatcctgcaacaggatccgaaagcacgcgtcgcctgtgaaacctacgttaaaaccggcatggttttagttggcggtgagatcaccaccagcgcctgggtcgatatcgaagagattacccgtaatacggtgcgcgaaattggctatgtgcattccgacatgggctttgacgccaactcttgcgcggtactgagcgcaattggcaaacagtctccggatatcaaccagggcgttgaccgcgcagacccgctggaacaaggcgcgggcgaccagggcctgatgtttggctacgcgacaaatgaaaccgacgtactgatgcctgcgccaatcacctacgcgcaccgtctggtacagcgtcaggctgaagtgcgtaaaaatggcaccctgccatggttgcgtccggatgcaaaaagccaggtcactttccagtatgacgacggcaaaatcgtcggtatcgacgccgtggttctctctacgcagcacgcagaagatatcgaccaaaaatcgctgcaagaagcggtgatggaagagatcatcaaacccattctgccgtctgaatggttaaatacgtccactaagttttttatcaacccaaccgggcgttttgttatcggcggcccgatgggcgattgcggtctgaccggtcgtaagatcatcgttgatacctacggcggtatggcgcgtcacggcggcggcgccttctccggtaaagatccgtctaaagttgaccgttctgcagcttacgctgcgcgttatgtcgcgaaaaacatcgtggcggcaggtctggcggatcgctgtgaaatccaggtctcctacgctatcggcgtagcggagccgacgtccatcatggtggaaacgttcggtactgaaaaagtgcctgctgaacagttgattctgctggtgcgcgaattcttcgacctgcgcccgtacggcttgattcagatgctggatctgctgcacccgatctacaaagaaactgcggcttacggccacttcggtcgcgaaaacttcccatgggaaaaaaccgacaaagcgcaactgctgcgcgatgctgccggtctgaaataatcgcccgcgcctgacgctgtttttcagtcagggaaaccataccgtacttatcaaggccagcgctctgctggcctttatcattgctgatacacgcaacgttatcagatattccagcgtgaatttatactgacctttttgtgatgcgcagcacaatccactctcccctttcgtttcttcgactacactttttatcattcagtttcagtcatcatgaaagcggttacattcattttcattaagaactgactacatcactatcggtatgctaattctgcgatgaaaatattacataatttttcaactttgtctaaataccaggcgattgatatggttataagattattaaaactattatttttcagataattaaataatcaccgagataaatagcagtgtaaacgattacaccattgtgattagcctcacatctttttacggcgtactcacctactcttaacatcgataaaattgctaacccaaccggagggcataatgcctgacaataaaaaacaagggcgttccaacaaggccatgacattttttgtctgctttcttgcagccctggcaggattactttttggcctggatatcggcgttatcgccggtgctttacccttcattaccgacgagtttcagattaccgcacacactcaggaatgggtggtcagctccatgatgtttggcgcggccgtcggcgctgtcggcagcggctggctctcctttaagctgggtcgtaaaaaaagcctgatgatcggcgctatcctgttcgtcgccggttcgctgttctccgctgcggcgcctaacgttgaagtcctgattatttctcgcgtgctgctgggtctggccgtcggcgtcgcttcctacactgcaccgttgtacctgtccgagatcgcgccggaaaaaattcgcggcagtatgatctcaatgtaccaactcatgatcaccatcgggattctgggcgcttatctgtccgataccgcgttcagctacagcggcgcatggcgctggatgctcggcgtgatcatcatcccggctattctgctgctgatcggcgtcttcttcctgccggacagcccgcgctggtttgcggcgaaacgccgtttccatgatgctgaacgcgtcctgttgcgcctgcgtgacaccagtgcggaagcaaaacgtgagctcgatgaaattcgcgaaagtttgcaggttaaacagagcggttgggcgctgttcaaagagaacagcaacttccgccgcgccgtgtttcttggcattttgttgcaggtcatgcagcaatttaccgggatgaacgtcatcatgtattacgcgccgaaaatcttcgaactggcggggtacacgaataccacggagcagatgtggggcaccgttattgttggtctgactaacgtgctggcaaccttcatcgctatcggcctggttgaccgctggggccgcaagccgaccctgacgctgggcttcctggtcatggcgattggtatggggattctgggtacgatgatgcacatcggcatccattcgccgtctgcgcaatacttcgctatcgctatgctgctgatgttcatcattggatttgcgatgagcgctggtccgctgatttgggtactgtgctccgaaatccagccgctgaaaggccgcgatttcggcatcacctgctccaccgcgaccaactggatcgccaatatgatcgtcggcgcaacgttcctgaccatgctgaacaatctgggtaacgccaacaccttctgggtctatgcgggcctgaacgtactgtttatcctgctgaccctgtggctggtgccggaaaccaaacacgtttcgctggaacacattgaacgtaacctgatgaaaggtcgtaaactgcgcgaaatcggcgcccacgactaatccctccacgcttcctcctgccacaggaggaagcgtttttcttgcagtccctcttccgtcgcactattctctgccgctatgaaaacccctcgtctccctatcgctatccagcaggccgtgatgcgtcgtctgcgggaaaatctcgcccaggcgaacctcaagctcgatagacattatccggagccgaaactggtgtatacgcaacgcggcacctcggcgggcaccgcctggctggagagctacgaaatccgcctcaacccggtgttactgctggaaaacatcgacacctttatagcagaggtcgtgccgcatgaactggcgcatctgttggtgtggaagcacttcggacgcaaggctccgcatggcaaggaatggaagtggatgatggaaagcgtgctgggcgttccggccagacgtactcatcaatttgcgctgcaatccgtacggcgcaacacctttccctaccattgccaatgccagcaacatcaactcaccgtccgccgtcataaccgcgtagtacgcggcgaagcggtttatcgttgcgttcactgcggtgaaccactggtcgccgggtagttcccgaaacgtccgggaactttcctgagcggactgattgcatacagacacaactttcgttacgttgcgggctcgttttgctatggagtgtgcaatgtaccgtaatttttcttttgccgctgcgttgctggccgcagcgttttcaggccaggccctggccgatggcattaacaatttttctcaggccaaagcggcgagcgtcaaagtcaatgctgacgcgcccggcagcttttactgcgggtgccaaatccgctggcagggtaaaaaaggcgtcgtagacctggagtcctgtggctataaggtgcgtaaaaacgagaatcgcgccagacgcattgagtgggagcacgttgtccccgcctggcaattcggtcatcagcgccagtgctggcaggacggcgggcgaaaaaactgcgctaaagacccggtctaccgcaaaatggaaagcgatatgcataacctgcaacccgcgattggcgaagtgaatggcgatcgcggcaactttatgtatagccagtggaacggcggcgaaggtcagtacgggcaatgcgccatgaaagtggattttaaagcgaaaatcgccgagccgcccgcccgcgcccgtggcgcaatcgcccgcatttatttttatatgcgcgaccaataccaactgaaactttcccgccaacaaacgcagctttttaacgtctgggataagcagtaccccgttaccgcctgggagtgcgagcgcgatgcgcgtatcgcgaaggtccagggtaatcataatccctatgtgcaacgcgcttgccaggcgcgaaagagctaacctacactagcgggattcttgttaacccatgccctggatagccaaacgccggggccatgacgcggatttttttattatgcgtattccccgcatttatcaccctgaattgttgacgtccggtacgcagatttcgttatgcgaagatgcggccaaccatattggtcgtgtacttcgcatgggaccgggacaagcgctacagctgtttgacggcagcaatcaggtattcgatgctgaaatcattagcgccagtaagaaaagcgttgaagtgcaagtgatgaaaggcgaaatcgacgatcgtgaatcgccgctgcatatccatctgggccaggtgatgtcgcgcggtgaaaaaatggaatttactatccagaaatcgatcgaactgggtgtaagcctcattacgccactgttctctgagcgctgcggcgttaaactggatagtgaacgtctgaacaaaaagcgccagcagtggcagaagatcgccatcgccgcctgcgaacaatgcgggcgtaaccgggtgccggaaattcgcccgccgatggcgctggaagcctggtgcgccgagcaagattccgggctgaagctcaatcttcatccgcgcgcccatgccagcatcaacactctgccgctgccggttgaacgcgtccgactgctgatcggcccggaaggcgggctgtcggcggacgaaatcgcgatgaccgcgcgctatcagtttactgatattctgttaggacctcgcgttctgcgtactgagacaaccgcgctcaccgccattaccgcgctacaggtgcgttttggcgacttaggatgaagcgttaacggagaaaataatgatcaagctcggcatcgtgatggaccccatcgcacacatcaacatcaagaaagacaccagtttcgctatgctgctggaagcccaacgtcgtggttatgaacttcattatatggagatggccgacctttatctgattaacggcgaagcccgcgcccgcacgcgaacgttgagcgtggagcaaaattacgataaatggtacgagttcggcagcgagcaggagattaaactcgccgatctggacgtcattttgatgcgcaaagatccgccgtttgataccgagtttatttatgcgacctatattctggaacgcgctgaagaagaagggacgctgatcgtcaacaaaccgcaaagcctgcgcgactgtaatgaaaaactgtatactgcctggtttgccgacctgaccccggaaacgctggtaacgcgcaataaagcgcagctcaaagcattttgggaaaagcacggcgatatcattatgaaaccgctggacggtatgggcggcgcgtccattttccgcgttaaggaaggcgatcctaacataggcgttattgccgaaacgctgaccgagctgggcaaccgctactgcatggcgcagaactatctgcccgctatcaaagatggcgataagcgcgtcctggtcgtcgacggcgagccagtgccttactgcctggcgcgtattccgcagggcggcgaaacccgcggcaacctggcggctggtggtcgcggcgaaccccgtccgttgagcgaaagcgactgggaaatcgcccgccgcgttgggccgacgcttaaagccaaagggcttattttcgtcggtctggatattatcggcgaccgcttaacggaaattaacgtgaccagcccaacctgcgtgcgtgaaattgaagcggaatacccgatctctatcaccgggatgttgatggacgccatcgaagcgcgtctggcgaagtaaaggtttattgcccggtggcgtgcgcttaccgggcctgagcaattacgccgccccggtcggataaggcggcgcatcagcatcgccatccggcaatctattgcccgataaggcagccgtcctttggcaaaagacggcttatatgagtgacaaccgtccgctttccccacatactgaacgctgtcgtttttttgaaccaggaaacagaacctctgacaatgaatttacagcatcactttcttattgccatgcctgcgctccaggacccgattttccgccgttccgtggtgtatatttgcgagcacaaccaggacggcgctatggggattattgttaataagcctttggaaaatctgcaaattgaagggattctggaaaaactaaaaattacgccggaaccgcgcgattcggcaattcgtcttgataaagccgtgatgctcggcggcccgctggcggaagatcgcggatttattctccatactccgccgtcacgtttcgcctccagcattcgtatctcagacaataccgtgattaccacctcccgcgatgtgctggaaacgttaggtacccaacaacagccttccgatgtgctggtcgcgctgggctacgcctcctgggataaaggccagcttgaacaagagttgcttgataacgcctggcttaccgcgcccgccgatctcaatattttgttcaaaacgcccattgccgagcgctggcgcgaagcggcaaaacttattggcattgatattctgaccatgcctggcgttgcggggcacgcctgatgagcggcaccttactggcctttgacttcggcacaaaaagcatcggcgttgcaataggacaacgcattaccggcaccgcccgtccgcttccggcaatcaaagcacaggacggcacgcccgactggacgctcattgaacgtttgctgaaagagtggcagccggacgaaattattgtcgggctaccgctcaatatggatggcactgaacagccgctgacggcgcgcgcacgtaaattcgccaaccgtattcatgggcgtttcggggtaactgtcacgctgcacgatgaacgactcagcaccgttgaagcacgctccggtctgtttgaacgaggtgggtatcgcgcgctgaacaaaggcaaagtggactcggcctccgccgtgattatcctcgaaagctattttgaacaggggtattaaagccgtttttgtcagcaggcgggtaacgcggtcacggttgccaggcttactgggcaataagctggtttagtgccttcagcgcctgtaaacgcgcagccgcctccgcctcatcaatccgccacattcccgcaaaggccagcgctgcggcgtgcttgcctagcggttgcgccatagaaacttcaccatcagcgtgatgccacagtacgtatccccgctggcgctgctgcgccacatgcggcgccagattacgccattgctccggagtaaaacgctgcattagcgcctcatcgctttctgccgccagtaacgccaccccaggtaccgactgccaggcagggtacatgcgaaaccccgccagcgcctgacttccctgcgaacccggcgtagagtgataaatatagataatctggtcttcccatagcacgcctaatgccaccacgatgtctttgggcgcatggcgctcaaggataggcaacgcatgggagaacagcgctgaaccgcgaatcgcctgcgccgccaaagcatgaatgcctggcccgggtaaatagcgtcggtgctcatcctgcatcgtgagtccaatagaggccatcgtcattaacaggcgattaacgcgcgtggtattaatatccatcagccgggcaagctcgcgacatccgatagcacggtcgctggagaccagatattgcagacagcgaatgccatctatcaggctttgattcggttgtgatgacatcgttaaatggcttcgctgtggttttaacaaagctgcgattttaacgccggttcgccaggatacaagcctgcatgccgttcaatccaccgcgccagtcaacactttacaacccccctacgccgccatcttcgctacagtcgtccctgcgcctgacgccattgcgcgctctgggcgaatgtcatcatcccctgctgctgcccggtttgtatcacgtgggccaactgatggagtttgccttcacggatcaaattccctgtggctggcgtattaatcagtaattcaaacaacgccacgcgcccatcctgtctgtcgacctccagtttttgtgatagtacggcgcgcagactacccgccagttggctgcgtaccggttctttttcctgcgccggaaaactatccactaatctttccaccgcctgcgccgcaccgcgagtatgcagggttgccagtaccagatgccccgtttccgccgccgtcagcgccaggcgaatggtctcgctgtcacgcagctctcccagcaaaatgacatcaggatcttcacgtaacgctgcgcgcagcccggcggcaaaagtggcgcaatgctggccgatttcccgctgctgtatcaggcaacgcttgctggtgtaacggtactcaataggatcttccagcgtcaggatgtgtttatcggcatgttgattaagatatcccaccatcgccgccagcgtggtggacttcccgcagccagtagcgccagtgaccagaatcagtccgttctcgctggcaagcagtgcgggtactatcggcggcgtctggattttcgccagatcaggacagcgctcgggcaatagccgtagcgccagcgacgttccctgttgatgtgtgaacgcactggcgcgcaggcgccgcgtgccagacagcgagacggcgaaatcaagctggccgtgcgttcgccactgatattgttgcgcatcattaagccaatcaagcagaagcctgtcgacatcaggcgcggtaaaaggcgcgttctccatgcgtccttgtttgcgccatcgcgcaggccaggcgttacacaggtgtagatccgagacgttatgctttacactaagcgtcacaatttcttccatattcatataaacatcctcggaaaatgaacgatatcgcgcataacctggcatacatccgggacaaaatctccgccgcggcgacgcgttgcggccgctcttcagaagaagttacgttgcttgcagtgagtaaaaccaaacctgcgagcgacatcgcagaagccattgccgccggacaacgggcatttggtgaaaattatgtacaagagggggtggaaaaaatccgccactttcaggaagcgaaagtggaaggcctgcactggcactttattggccctttacagtccaacaaaagtcggctggtggccgagcattttgactggtgtcataccatcgatcgcttgcgtatcgcctcgcggctgagcgaacagcgtccggataatctgccggcgctaaatgttctgatccaaattaatatcagcgatgaaaacagcaaatcaggcattccgctggcggaactggatgagctggccgctgcggtggctacactgccgcgtctgcggcttcgcggactgatggcgatcccggctccagagtcagattatgtaaggcagtttgaagtcgcacgtcaaatggctgtagcatttgccgggctgaaagcgcgctaccctgacgttgataccttatctctgggtatgagcgacgatatggaagccgcgattgcggcaggtagcacaatggtgcgcatcggcaccgctatctttggtgctcgtgattacacaaaaaattaaggaaaactgaggaacgccatgaatacgttgaccttcctgctctcaacggtaattgagctgtataccatggtgctattattgcgcgtgtggatgcagtgggcccgctgtgacttttacaaccctttttcccagttcgtggtgaaaattacgcagcccatcatcggaccgctgcgtcgtattatcccgccaatggggccgattgacagcgcttccctgctggtggcgtttattcttagcgttattaaggcgatagtgctgtttaaggtaattacgtttcaggcgattatctggattgccgcggtgcttatcttgcttaaaacaatcggcctgctgatcttctgggtgctgctggtcatggctatcatgagctgggtgagccagggtcgtagcccgattgaatatgtattgattcagcttgccgagccgctgctcagcccgattcgccgtatactgcctgcgatgggcggcatcgacttctcgccgatggttctggtgctgctgctgtatgtcgttaatatggggatcgctgaagtcttacaagcgacaggcaacatgttgctgccggggctgtggatggcgttatgagtgctgtgactcgctgcgaagacggtctggtgttacggctttatattcagccgaaagccagccgcgatagtattgtgggtttacatggcgacgaggtgaaaatcgccattaccgccccaccggttgacggtcaggcaaacagccatctgaccaagtttctcggtaaacagtttcgcgtggcgaaaagtcagatcgtcatcgaaaaaggcgagctgggccgtcacaaacaggtaaaaattattcacccgcaacagatcccgccggaaattgcggcgttaactgagtaggtactccatgcaaaaagttgttctcgcaaccggcaacgccggtaaagtgcgcgagctcgcgtcgctgttaagcgattttgggcttgatgtggtagcgcaaacggaactgggcgtcgattccgcggaagaaaccggcctgacgtttattgaaaacgcgattctcaaagcgcgccatgccgccaaaatgaccggcctgcccgccattgccgatgactccggtctggccgttgacgttttaggcggcgcgccgggtatctattccgcgcgctattctggcgaaaacgcgacagatcagcaaaatctggaaaaactgctgcatactctacgggatgttccggacgacaaacgccaggcgcgattccattgtgtactggtttatttgcgtcatgcggaagatcccacaccgatagtctgtcacggtagctggcctggcgtcattactcgccaggcggccggaaatggcggatttggctatgatcccattttcttcgtaccgtctgaaggcaaaaccgccgcagaactgacccgtgaagaaaaaagcgcaatttcccaccgtggacaagcgctcaagctgctgctggatgcgttacgcaatggctaaactaccgccgctcagtctttatattcatattccctggtgtgtacaaaaatgtccatattgcgacttcaattcccatgcgttgaagggcgaggtgccacatgacgactacgtccagcatctgttaaacgatctggatgccgacgtcgcttgggcgcaagggcgtgaagtaaagaccatttttattggcggcggtacgccaagcctgctttccgggccggcgatgcaaacgctgctggacggcgtgcgtgcgcgcctgaatctggcggcggatgcggaaattactatggaagcgaaccccggcacggtcgaagccgaccgcttcatcgactatcagcgcgccggcgtaaaccggatctccattggcgtgcagagctttagtgagcctaagctgaaacgtcttggccgtattcacggtccacaagaggcgaagcgggcagcaagactggcaaatgggcttgggctacgcagctttaacctcgacttgatgcatggattgccggaccaaacgctggaagaggcgctgaacgatttgcgacaggcaattgcgcttaatccgccgcatctctcatggtatcaattgacgattgaacccaacactctgttcggttcgcgtccgccggttttaccggacgatgacgctctgtgggatatctttgagcagggccaccagttattaaccgccgcgggctatcagcaatacgaaacgtcggcctatgccaaacccggttatcagtgccagcataatctgaactactggcgctttggcgactatctggggattggctgcggcgcccacggtaaagtcaccttcccggacggcaggatcctgcgcaccaccaaaacccgtcacccacgcggttatatgcagggacgttacctggaaagccagcgtgacgtgagtgatgacgataaaccctttgaattctttatgaactgttttcggttgctggagcgcgcgcctcgcgccgaatttgtcgattataccgggcttacggaagcggttattcgtcagccaatcgacgaggctattgcccagggctacctgaccgaatgcgagcaatactggcagattacccggcacggtaaactgtttttaaactctcttcttgagttgtttctcgcggaataacaaggataagcctgtcgcgccagcgggtaaaatacctgatggcgcgacgcttaccgacctgtggcggttaatgcgccgccggcaaacgcattatttaataacccctttacgacgcaaatcgtccgtatcttttttccagcgctcgtaaccgtcattaatatccataattttcacacggatatcactctgttgcatctgaagtttctgtaccgctatattcagcggatattgccctttctctaacgttatccagtcattctgcgcttttcgacgcagctcttctgatttcaaaaatacctgccgccgttgctcgtgtatgtctaaatctcttttctgctgaatagccgcttcattgcacggctcactctgcttacggcacgcgtctaatgccggttgatagacctctttttcgtatttctcggcatatacgctgctatcgttggcttttacataatcatcgcgctcttttaacgtctttttaaacgcctcggcgcgggtcaacggtttcccatcagcgccttttccccaatacgcgtccgcttcttttttagctaccgctattttcttatccagggcagagagttgttcttcaagaccggggatcgacgctttctgcgcacgccaggaggcttcaatgttgccaaaccgatagttaaagtcatcactgttgacgatcaggtatttatcattcgttttaatgtcgtcaatagcccggccctgatcgctggctgccatttgtaatgagtaatagttcaccgtccagccagaggctggcgtccctttactggttaacatggcagaaaatttaacgggacgatctttggtccaggttttttcaacaaaataataatccgccgccataccaacgccggtatacatatcttcacgggaagaaatatccccttcggcagaccaggtggcctgattgcccgtcgaatcaagattttttaaggtaatggaatccagtttaagtatgccgtggtactgcttactaaactgttcttttaagatgttatcggagggttgagcaacctctgcccaactatagcctgaaatcagggcaaacagcgctgcgccagcaatccattgtcgaaccacttgtggacctcccgtccagagacatgacacccacgattatcataaccaggatgataattagcaagataatagtgttggttgtgcgagaggtcttccaaagatagccccggccttccgaccggggcattatctttaatactgattgaacatcgtctggatctgttttggatctttagtctgggttaacgccagttgcagtaagacacgcgctttttgcgggttcagcgtgccggaagcgacaaagccgtattttgcatcgtcaacttccgcatcctgcgtggttgcgccagtcggcactcgtgaagaacgcaccactaccgtaccgttgtgcgcggcggtcgccagggtatcaaagaccgttttatacaggttgccgttacccactcctgcgctcacgatcccgtcataacccgcgtctaccagcgcttttgccggcagatcggacgcattcgcatagttataaacgataccgactttcggcaacgcggtcagcttcgacacgtcgaacggggtggaggtggtatgtttacgctctggcgtacgctggtagtcaattttaccgttgtggatataacccagcgggccgtagttaaccgctttaaacgtcgccacgtcagtcgtattggtcttagtgacgtcgcgtccgtccatgacggtatcattcattaccaccagcacgccgcggttggcagactgtttatcagccgctgttactaccgcattatagaggttgaacgggccatctgcgctcattgacgtggaaggacgcatcgcgccgaccagtaccaccggtttattgcatttcacggtcagatcgaggaaataagcggtctcttccatcgtatcagtaccgtgggtgatcacgaaaccgtcggtgctgtcgcactcggtattgatttttttcgccagcgtgagccagacttcatcgttcatatcctgcgagccaatgttaacgacctgctcgcctttcactaccgcaatgtccttcaattgaggaacggcatccaccagattttcgacgccgactttacctgccgtataatttgattttgttgctgaatcaccaccgccagcgatcgttccgccggtcgctaagatggtgatattcggtaaagcgaacgctgcgccgctgaaacccattaccagagcagctaatgccgttttcctgaaaaactccatgttatatctccagttatgtcaactggtcgcattatctctatattgcagacgaataatgtgacgccatacgattaaccagcgatatatatccgacagagagtattttttagagatggataacaaaatgcaggaaaaaacagaataaaaaggcgcagatacgatctgcgccattgtttaaaaaggaaagattacttcaggctgccaaccagcgctttgcggctatcttctaaggtcactacgcggctacagacatctttgccaaactgctggaaatctttctcctggtttttccattcgttctggatagcggtttgcaaaccacctagactgcccatcacgccctgtaaaggattgccgccgcctttaagcaccgctttggcgcccatttcgttaatgctgtcctgcaaaataccgcccatcgcctgattcaccaactgctgaccgtcggcacgcacctggtcgatagccttatagtggaacgtcaggccgtccgtacgatgttcgataatgcggttcatttgcgcttttaattgcgcatcaagcttcgtcagacggctacgcatgttgctgctttcgcccacctctttagcgatgattttatccagcgccacgcggcctttttcgacgcgcgatcgggcgccctcatcaatccacggcagcgcgcttcgcagttccgcctggtaatctttcgcctgctcgcgctgcgcggcgctaagggtgtactgcttaccgttgtacatcacattgccgtccggcgtgatcaccaggttgccgttttcacctttcacctgcaccgtttgtggactcaggatcacatcgtcacgcggcgtgacgctgcatttgtaatctgcatgagcggccatcgccgtaaacgttagcactgtcgccagcagcgttttgcgcatcataactttccctcaagacaaagcgggccggcatttgccgaccctgtacttattagtcccaccaaacgtcgaaaagttcgctggttcggacttcttcaaggttgcgcgcttccagccacttacgcacaatcgcctgatgttcttcggtacatttaccgatttcctgcatacaaatcagcccttcccaggccaggtagccgctgccgtcaaacgccagtttattaggctcaataacgtcattaataaagtcatcgacagtcttatcgacctgctcttcagatgtaccttccggaaaacgccatgccaccgaaaatcctaattcctggaattcgtcaatgtgcatttttttacgcagacgacgactacggttctttgccattatttcaccctctcgaacattaagtcccatacgccatgaccaagacgatggccacgttgttcaaatttcgttaccgggcgcgattccgggcgcggtacataatcattgctctctgacagatttttgtacccgtcgatagaagacatgacttcaagcatgtgttccgcatacgcttcccagtcggtcgccatatggaaaacgccgcccaatttcagcttgctcaataccagttcagcaaacggcacctgaacgatacggcgtttattatgacgcgctttatgccacgggtcagggaaaaagagctgaaccatcgataaagaattgtcaggaatcattttatgcaacacttctaccgcgtcatggcacatgacgcgcaggttttcaacgccctcttcattagcggacgccagacacgcgccgacaccgggtgaatgcacttcaatgccgaggaaattctgctccgggcgcgctttcgccatcgccacgagagacgcccccatgccaaaaccaatctccagcgtcaccggcgcttcgcgaccaaacaacgtggcgaaatctaccggcgcttcgctgaactcgacgcccatcaccggccagtagttttccagcgcgtgctcttgcccctttgtcagtcgcccctggcgacgaacaaaactacgaatacggcgcagcgggcgaccgttttcatcaaattccggtgaaatgacgtcgtttttcataaaagtgtagtctgctgtgtttgagttctgaaaacgggcattatccaaagttagttgccggatgcaagcatgaagcgcactgcggaaagttccggtttacaccctgcggcctctgtgctgcaatcttgcccccggcaataatgaatgagtttccatgcaagcgtctcaattttcagcccaggttctggactggtacgacaaatacgggcggaaaacgctgccctggcaaattaacaagacgccttacaaagtatggctctcggaagtcatgttgcaacaaacgcaggtgacgacggtgattccttactttgagcgatttatggcgcgctttccgacagtgacggatttagcgaatgcgccgctggatgaagtgctccatttatggaccgggctcggctattacgcccgcgcgcgtaatttgcataaagcggcgcaacaggtggcgacgcttcacggtggagaattcccgcaaacttttgccgaaatcgccgcgctacccggcgtcgggcgctcaaccgccggcgcgattctctccctcgcgttaggtaaacattatccgattcttgatggaaacgttaaacgtgtgctggctcgctgttatgctgttagcggctggcctggaaaaaaagaggtggagaatacgctgtggacgttgagcgagcaagtgacgcccgcacgcggcgtggagcgttttaatcaggcgatgatggatctgggcgcgatggtttgtacgcgttcaaagccaaagtgcaccctgtgtccgctgcaaaacggttgtatcgccgctgcgcatgaaagctggtcacgctatccgggcaagaaaccgaaacagacgttgccggagcggacgggttactttttattgttacagcataatcaggagattttcctggcgcagcgtcctcccagcggtttatggggcggactctactgctttccgcagttcgccagagaagatgaattacgtgaatggctggcgcaacggcatgttaacgctgataatttgacccagcttaatgcgtttcgccacacatttagccatttccatctggatattgtgcctatgtggcttcccgtgtcgtcactggacgcctgcatggatgaaggcagcgcgctctggtataacttagcgcaaccgccgtcagtcggactggcggcccccgtggagcgcttgttacagcagttacgtaccggagcgccagtttaacgccccggtcgatgaagaggatgacttatgagcagaacgattttttgtacttacctgcaacgcgacgctgaagggcaagattttcagctctaccctggcgaactgggaaaacgtatctataacgagatctctaaggacgcgtgggcgcagtggcagcataagcagaccatgttgattaacgagaaaaagctcaacatgatgaacgccgagcaccgtaagctgctggaacaggagatggtgagcttcctgttcgaaggcaaagacgttcatatcgaaggttatacgccggaagataaaaaataggcccgttgctgaatgacgctgcgcttattcggcctgtgagttatgccggataagcccttagcgtcgctgcccggcaacatggcataacgacaacacaacatgcactcccggaatgatgaaaaaattactcgcgcttgctgttattgcgccgttgctcatctcctgctccagttcgaccaaaaaaggcgagacgtataatgaagcctgggtcaaggataccaacggctttgatattttgatggggcaatttgccaacaatattgaaaatctgtggggatataaggaagtcctgattgccgggccgaaagactacgtcaaatataccgatcagttccagacccgtagccacatcaactttgatgatgggaccattaccgttgaaaccatcgccgggacggaacctaccgcacatctgcgccgggctattattaaaacgttgctcatgggtgacgacccaacctccgtcgatctttactccgatgtcgatgacataaaaatttctaaagaacccttcctgtatggtcaggtcctcgacaataccggccagcctattcgctgggaaggccgcgccacgacattcgcggattacttgctgaaaacgcggctcaaaagccgcagtaacggcctgcgtattatttacagcgtcaccattaatctggtgccgaaccaccttgataaacgcgcgcataaatacattggcatggtacgccaggcctcccgtaaatacggcgttgacgagtcgctgattctggcgattatgcaaacggagtcctcgtttaacccgtatgcggtcagccacgcggatgcgctgggcctgatgcaggtagtgcaacacagcgccgggaaagatgttttccgttctcagggtaagtccggcacgccaagccgtaacttcctgttcgaccccgccagcaatatcgataccggcacagcgtatctggcaatgttgaataatgtctatctgagcggtattgagaatccgacgtcgcggcgctatgcggtcattaccgcctacaatggcggcgcaggcagcgtattacgcgtattctcgaacgataagattcaggccgcgaatatgattaaccgcatgtcgccgggggatgtgtaccagatattaaccacccgacatccatctgcggagtcgcgccgctatctgtataaggtgaattccgcccagcgatcgtatcgccgccgataaaccatcgcatcccgcctctggttggcaaatgacagaggcgggaaaggtaaaagtgttaactccgtcacccttttgctttgcaatcagaaattgtttgcaaatatttgtcacaggtaacaaaaaaagcccgcctctcattgatagaatcacaccaaatcacaacggcaaatgtgccttttaaaacattcatccgctctcaggtgtgaggaaattaacatgaatcttaagctgcagcttaaaatactctcttttctgcagttctgtctgtggggaagctggctcactaccctgggctcgtatatgttcgtcaccttaaaatttgacggcgcatctattggcgcagtttatagttcactggggattgccgccgtctttatgccgaccttgctaggcattgtggctgacaaatggctgagcgcgaaatgggtctatgccctgtgtcatgtcgtcggcgccatcacgctattcatggccgcggaagtcactacgcctggggcgatgttctttgtgatcctgcttaactcgttggcctatatgccgacgttgggcttgatcaatactatatcgtattaccgcctgcagtctgccggcatggatattgtgactgacttcccgcctatccgtatctggggcaccattggctttattctggcgatgtggggcgtgagtttctccggtttcgagctgagccatatgcagctttatatcggcgcgacgctttccgttctgctggtactgtttacctttaccctgccgcacattccggtggcgaaccaacagaaaaaccagagctggacatcaatgctgggccttgacgcttttgcgctgtttaaaaataagcggatggcgattttcttcatcttctccatgatgctgggcgcggaactgcagatcactaacatgtttggcaacaccttcctgcatagctttgataaagatccgctattcgccagtagctttatcgtgcagcacgcctcggtgatgatgtcgatttcgcagatttctgaaacgttattcatcctgaccattccgttcttcctgagccgctatggtattaagaacgttatgcttatcagtattgtggcgtggatgctgcgtttcggcctgttcgcttatggcgacccgacgccgttcggtaccgttctgctggtactgtcgatgattgtgtacggctgcgccttcgacttcttcaacatttctggctcggtgtttgtcgaaaaagaagtacgcccggaaatccgcgccagcgcgcaggggatgttcctgatgatgaccaatggcttcggctgtatcctgggcggcattgtgagcggtaaagtggtggagtattacactcaaaacggcattaccgactggcagaccgtgtggctcatcttcgcaggctactcgctggtgctggccttcgcgttcgtagccttgttcaaatacaaacacgttcgcgttccggcaagttcgcaacccgttgcacattaatccttgccctgtttcgcaggccggataaggtgtaaatgccttatccggcctgcaggcaacgttactttaaaacatatccgtacaagcgttgaattccatcggcatcggtctcgctatataccccctgcaattccggcgaaaaaccaggcaacagattgatgccctcttccagcgccaaaaaataacgctgcgccgcgccgccccaaatctcccccggcaccacgcacagtacgcccggcgggtatggcaatgccccctcggcagcaatacgcccgcccgcctcgctgatacgcaccagctctacatcgccgcgaataaaggcgctgttggcatcctgtgggttcatcgccacatgcggcaggctttctttgcggaacatcgctttttgcagatccttaacgtcaaagctaacgtacaggttgtgcatctcctgacatagctcacgcagggtgtaatcgcggtagcgcaccgggtatttctgaaaaaccgtcggcaatacatccgcaagcggcgtatcgtcttcaatgtgccgttcaaattgcgccagcatcgcgaccagtcgcgccagcttctcttcgctctcggcgggtgtcagcaagaacagaatcgagttgagatcgcacttctcaggcacaataccgttctcacgcagatagtgggcgagaatggtcgccgggatgccgaattcggtgtatcgcccactatcggcatcaatacctggcgtggtcagtaacagtttacaggggtcgacaaaatactggtcatccgcatagccctcaaagccatgccatttcgccccgggttcaaaactgaagaaacgacgattgctggcaatggtctccgtcggatatgcctgccacggcttgccgtcaaccaccagtgggataaagggctgaagcagtttgcaacgggcgagaatggctttacgcgcgtcaatgcccagcgcaacgcactccgcccacaggcggcgaccgctctccccttcgtggattttggcattgacatccagcgccgcaaacagcgggtagaacggactggttgaagcatgcaacatgaaggcgttgttcaggcgtttgtgcgggcaaaaacgcgcctggccgcgaatatggttatcttttttgtggatctgcgaggtttgtgagaaccccgcctgttgcttatgtaccgattgggtcacaaagatcccagggtcgttttcattaagctccagccgcaacggcgaggtatccgccatcatattgataaactgctcatagcctacccacgcggagtcaaacagaatgtaatcgcagagatgcccgattttatccaccacctgacgggcgttgtaaatagtgccgtcataggtacccagctgaatgatcgccaggcggaacggacgcgacgcatcggcgctttccggcatcacgtcacgaatctggtcgcgcaggtacgtttcatcaaaacagtgcgcatcaatgccaccgataaaaccaaacgggttacgcgccgcttcaagatagactggcgtcaccccggcctgaatcagggcgccgtggtggttggatttgtgattattacgatcaaacagcaccagatcgccgcgcgtcagcagggcgttggtgaccactttattcgccgccgaagtcccattcagcacaaagtaggttttatccgcattaaacacttttgccgcaaatttctgcgcgtgtttggcagaaccttcatgtattagcagatcgccaagtttcacatcggcgttacacatatccgcacgaaacaggttttcaccaaaaaagtcataaaaatggcggcctgcgggatgttttctaaaaaattcgccatgctggtgccccgggcaagcaaaagtactattccccatgtcgacatactgggtcagggtgccataaaagggcggcagaagttccgcttcgtagcgacaggcagcgttttccagctccagccattcctgcgcgttcccgactattaccgccgtaacgccgacaggcgcgctgacgggttcatccgcaagcataaacaccggcaggtgaaaaccggtgcgtttaagcaacgccagaataccgctacggctgtcggcagtggtaatgacgactgcggccacatcggtaaagtcggtactgtccagcgccactacgtttcggtgggtggagagacggggaatgagttcaccgctggcggcaatattcattgatttcataagcgcaaatatccgtttcgggagtagagtaaccccagacaaggcccgatgccttgcccaacgagatgccgggtcaaactggataccagctccgaccgccagacatcagtaaaaacagactgtttctgattttactgttgtcctgcagtgagcgtgcgctgccctcaccgcatagcggggatgacaaaaaaaggaaagaaaggggcaaacctcgcgcagtcaggcgacagtgaagacaatataaaggcgctatgttcatcccggcgagccccatgctggcaggagaaatttcgcgcaatcatggcacctttcaccaggcggcgcaaggtaaaatcagcgctctatacgtcacagataatcaagctattaacagcttaatcgcgtgataataaggcaatttgaaagacaaataacaggagtcattgtggtaattggaccttttattaacgctggcgcaattttattcggcggcgttattggcgcgctgttaagtcagcgtctgccagaacggattcgcgtctcaatgacgtctatttttggtctgtgctctctgggaattggcattctgctggtgatgaagtgcgctaatcttccggtgatggtgctggcgacgctggtcggcgcgcttatcggcgagttttgtttgctggaaaaaggcattaatggcgcagtcgcgaaaatccaacaattatttatggcatcgggtaagaagccgacacacgactcatttattcaaagttacgtcgctatcattgtacttttttgcgccagcggcaccggtattttcggcgcgatgcatgaagggatgaccggcgatccaaacattttgatcgctaaatcttttctggattttttcactgccattattttcgcctgttcgcttggcatcgccgtttcggcgatttgcgcgccgatgttgattatccagttaacgcttgccgcctgcgccaccctcattcttccactgaccacgccggcaatgatgggcgactttagcgccgtgggtggactgctgctggtggctaccggcttgcgtgtatgtggaatcaaaatgtttccggtagtgaatatgctcccggcgctgttgctggcgatgccgatctccgccgcatgggcgatgttttttgcctgattctgcgtgcaataacaacaaagtggtgatagattgtgcagtctacgttgatttgaagaaatttcgttgacgaagcgaggcgattacggtttaatgcgcctcgttgcccggatagctcagtcggtagagcaggggattgaaaatccccgtgtccttggttcgattccgagtccgggcaccactttcccttttttatgctttcttatgaattcctcgatgtcttcaagtcaataagtttgaacatagactctttccagaaattattgccatatgatctccattagaccaatataaacggatgcgtgatcataataaaggcagtaatagtaagttttaacattaaacatactgcgaaatttcaattaagtttccatcagggtccctgatgtagatagacattatctcgcctgtggctccagttctctcaaccgggccttcaacaatggaaatgcctgcctgtaagatctcagacacaacatcatttatcggtgtcgatgtaataaaacataaatcggcagatcccggcgttggtctactcgcttttggttcgaactccatttcttgctgatggaggttaattttttgcgctccaaatattaacgcttttctgttttgtttaaatgttaccgcagaaaaaccaagtacctcttcgtagaatcttattgtggttgatatatcagataccgttaatacaaggtgatcaattctgtcaattatcatttgaatagactcatgatgtttatattttagggatgctacattaaaaaatagcattaacctacttttaaatcagatgcattttttttgcatctactctaagttgctgccgaaaattgggatgtgccaattcaatgatgctgagcgcacgctcggttgaagagagccccttcaggtttacggagccaaattcagtgactatccagtgcgtatccgttcgtggggttgttacaggcccctcaaggcggggaacaatacgagaaatcgtatcattcgcggccgttgagcgggtcgtaataatggaacgacctcctttagatgcatatgcgcctctgacaaaatccaattgccctcctgaagcgctgtactggtgtccaagcaaatattcagagttacaggcaccagtgagatcgatttgtaaggtagcgttaatggagacaacattctcattttgcgcaatgatccccggatcgttaacataatcgacaggccgactaaaaaaagaggggttgtcgttgagatagtcatacatatccttttgtcccatagcaaaagtaaatacagacattccccggtcgatatttttacgctgattggtaacgacgccttgttgaatcaaacttaccaaccccggattcagcgcctctgtatggacccccagatcattatgttccttgagcgcattacagatgagctccggtaatgcgccgacccccatctggagacaagcgccatctggcacaagagaagcgataatctgactgatagcaatatcttcggctacggcagtacgtattggtagttcaattaaagggacatggttttcaacaatggcgtcaatttctgaaatatggattgcagcaccttctccatgaacgcgcggcatatatttgttaacttcgacaataagctttttagctgtcctcgcaatccgggtggaataatcgtttccagttccaaaattaaaatagccatacttatccataggggacacggtgtgaataaaggtatcaataccaatatcatcagctagtaatcgcgtcgcctgatgaaaatttgaaggtacatagttaactatttttcgcccggaactctcaatcccctgacgtattaaagcccgttcaataccggtaataaacatactgtagagatgaatatagtcacttagctcataacggaaaatagtgttcccggcaatgctggctgtttcataacagtaaacccgcagatcgttgatttctccccttttcgctcgctttgccagcgcattcagcaaagctggaggctctgctgcaaacattcccatagagaggtgactgccggaggtaattaaagtaaccgcctcgtcaggcgtcacgcatttttcggcatacactgcattaacattcatcatgactctaaacctcagggcgatttctcaataagcggcgtcttcttcaggcgaacatccacagcaataaactaacattgttcgttcgaagcgcatgacctctacaccattctggttaataccacatgtccgaacggtaacgatgccttgtcccgggcgactatttgacaggcgtttgctgagtacagtgctttcagcataaagtgtatcccctgcgaaaaccggatggacggcttgtaccttatcccagccaagattggccacgaccttggcgctgacagtacgcacgctcataccggttaaaagcgccagagtgaacgttgaatcaaccagtaactttttccattccgttttgctggcgtaagccgcatcgaaatggaccggctgcacattgagagtgagcagggtaaaccacacattatcggcgtccagaaccgtccggccgggacgatgttcaaaaacatcaccgggatgaaaatcctcccagtaaagacccgaaatttctcggtagcgcccctcgctaatggttttataagcgggtaataacgtgttcataatcaattcctctgttaataaaatcaggaaaagatccctgcccgggcgagtaatctccgggcctgacgggcaacggcttcatctatcatcatgccgctaacgatcccgacgcctttggcattctctgtcagtactgcacgagcatgattaatttctgccgttgtaggagtaaatgcggcgttgattacactaatctgagcggggtgaatagccgattttgcagaaaaaccaaaactgagcgcctgcagcgtttcctctttcagacctgaaaaatcgcctatatcaaagaagggagcatctattgcaagaagccctttcatagcgcaggcagccactattctggcccgcgccagcgcaagaggctcccaggcgggtgtggcgccaatgtcagccgccatatctgcggcgccaaacatcaacccgcagagtctgggggtggcgtccgcaatagactctacggcattaagcccaacaactgactcaataatgccaataaggcgagtatcagaaccagccatcatgataagactatccacgatttgcaggtgcgcggctgactctgtttttggaagaataatgtaatcaggaaaaaaacggcattccagtaacatatgcaggtcttcaatgccagcatgagtattcattccattaattcttaatgctattttcagcgatgagtttggtcgggatgaaaggaactgcatcgcaattttccgggcctgcgccttgtcattcggggtgacggagtcttcaagatcgataatagaaatgtccgccgcactttcaactgcttttatgaaacgttctggtcgaattgctggggtaaaaagccagctacgtgtcggtgtatgagaaatatcgggcatattgcacctcctgttaacctcactatgcgctcgctggtttcattcttccaatatatgatggtgccattcttaattgcttttggagatgaggatggaactgcgccatattcgctattttctcgccgtcgctgaagagcggcatttcacgcgggctgcgacaaaattaggcataggtcagccgccgctaagccaacagattaaggatctggaaagagagctgggagcgcagctattccggagagtgcctcatggcgcggaattaaccgaggctggaaaagcattttatgatgttgttaaagggatgcctgctaccgcgacaagagccgtgctggcggcgcagcgtgtcgccaggggggagtcgggcgtgttaagggtgggttttactgcctctgcggcatttaacagtgtggtgcccggcgcaatccgtactttcaagcgggcttatcctgacgttcgtttgcagcttgaggaaggaaatacaacccaactggctgatgaattgaatgaaggatcgctggatgttgcctttctgagacccggttttacaggcaatgaacggttccagctcaggttactgtctgaagagccaatggttattgtgctggcagaaacgcatcctgctgcggcgtgtaaacagattgcactctcgattctcaaagatgagttttttttactcttcccacgtgaaatcggcctgtcgctttatgacgcagtgatcaaggcctgcggtaaagcgggctttgaaccgaaaattggtcaactcgtgccgcaaatttcgtcagtcattaaccttgtgtcggcagagatgggcgtgtcgatggttccagattcaatgagacaggttaatgtcaagggagtagtataccgccccgttgcagaccagatgcccgtcgcaaaactggctctggcataccggcgcggcgatacatcgccaacgctgagaaacttcatcctgaaagtcactggctgaatgcggttatgtgagcgttgaataatcatttgaaacgtaaccaataattattggtccgattttgtgtctaaaggaatcgctaacggagcaggaactggctgcaatgtctgtggatcgacagccagataacgcccggttttactgtcgatacccacataatcgataagcttgcctttggcataaagcaccattgtctgttttgcaaatgcctcatatgcgctgctcagtattttcactttatccgcataatttgctgcgagattatgcgtttccagggggtcacgttgcaggttgaataattcccatggcgcattacccgcctgtgggaatactgtgacaagacgacgcaatttccattccccatctatccaggccgcctgattatggagttcaacaccatattgtgtgcgaggcgcgtgcagactttcaccggtcagatagcgtttaaaactcacgccgatcattggcagtgtcggtctttcagataatgatttactggcatcaatacctgcaaattcatagagcgtgggcgcaacatcatacgccgccatcgtggcgttatctatggcgccatgatggatgataccaggaccggaaatcataaaactggtattaattcccccctgaccgctggtcgttttgtgatagcgaccataaggcgcattgctgacatcagcccagtggggaccataagagataaatgaatttttacgaccaatattttcgtaacgattatcgaattgcttccaaaaatccggttcagattcatagtgaaagccctccgccggattcacaccattatcacttaagaagaccagaatcgtgtttttatcgcgcccggtcttttttaacgtctcaataacggtgccgatctgtgcatccatattggcgatcatagcagcgtaaacctgcatcaccttcgccgtatatttctgctgttccggggtcatcgcctgccattctttatcaagttccagtcctggcagaggtatgtcatcacgcaggaaacccagtttcttcaaacgagcaatacgctgacgatagacgtctgcatagccctgttcatactgacttttaaaacgactaatccattcatccggcgcctgcagaggatcatgtggcgcagtaaaggccaaccacgcgaagataggttgttcccgtggcgtctcgctgatccagcgattaatctggctggcataggcttcgctggagtaaaaactggagggcagtgaaatgcgctgattgtcacgggtataataggtatgaaatatctccacggttcccagcggcacggcatcatcaaagtgactggcgcctccccccatcaaggcgaaagaatgacgaaagccccgatcttttggcgtcgagcctggcgtaaaaccaagatgccatttacccgccatcagcgtattgtaaccagcatctttaaagcgttcagccatggtcgtcacccgatcagtcaggcgcaattcatagccttccttacctatggtattttcataccaccacataccgcctatacccgcttgctgactggtgttcccggttaatagcatcgcacgggcgggagcagacatgggagacgtgtaatattgactcatccgcacgccgttctcagccatcgcctgcaaattaggcgttgggatttccccaccgaagggagtgatatcagaatatcccatatcatcagcgataatcacgataatatcaggacgttcgttttgcgtactgtgcgccgtaccggagaagataatgctaagtgtggcaagtgttacttcttttttcacggcttattctccatttcagactacggatgttgtacaagagcggcgggcaaatgcggcaagaggaaccatcagcccgaaaatctacccataacgtcagcacgccaggctttcagtccattcagatcccggggccaggcgcgtagcggagccagaatctccgtgaaaaaagagtaatagccgctacaaagtcggttgtagccggcactgttgatatgtgcggggcagcctccctggcagactattttcacagaacaccgttgacactcccggcgctggcttttcttaataccaaagggaagccgggttgcggaatctacggctggcgctaacgtattattagcaagctgtcccaggtaatgctggctattaatcagatgatcgcaggcatagagtttgccgtccggctccatgaccagattcgttccgcagcgggcggaatggacacaggtggcgctgatatgcgtaaaatattgtgcccatgcctgttcaatgttgatcacaaaaacccgtcccatatcgccgcgtttgcgccattgacgccagatatcaatcatgaaacgtccccagttatccgcactcaattggtaacgttgctgtagggcgttgccttcgttcatcagtggctgaaattgcagataacgaacgccaaggctaacaacatgatcgtagatggctgccgcatggcgagccatgtcatcatgcacgacaatcagtacattaaaatcgactcgatagtgttgtaacaatgtgattccccgcaacaccgccggatagctggcctcgccgcgtttgcccggacgatgatgattttgcaagtcttcactgccctcaagactgatgccaatagtaaaattattgtcgcgaaacagacggcaccaggcatcgtttaacaacgtcgcattcgtttgcagactattactgatcgtcacgccgtcaggcgcatatcgttgttgaagcgctattacctttttataaaaaccgattccggctaaaagcggttcaccgccttgccagacaaaattaatttcacgcgcactggcaggttgcgccgcaatatagcgacaaataaaaatctccagcgttgattcattcattttttctacgggcgtttcgccctgtggataataacaatagcggcaggccagattacatgcagggcctatgggctttgccagaatatgaaagggtatctgcgcgcgatattccgtcattacggggatttgttgttgccgtaatgtgttgagattcaacattattctgtcctgtagttatcatttctgatgcggagacatgactcacatttcgcaatagcgttcgtctggcgctgcgggcagaatgccgagagcaggctgtatctattgatacgccggttttctgcatagcgcatgacgctattgaaacgttatttagcaaatcctgtctgagccagaaattaagtctctgttaacctgcgctattacagaaaatcatagaacagtcgtctcaaaagaatatcgtcctgaaggacgagaactcacggcattttcaggagatgagtcaaccgcgacagaaaaaaatcatattaataattttaaattattttttagaaaaccagacaggatttaaattaaaatcatttattttcaagatgttataaaaaataccgcaacatacgtcacattattaacatgtgaatgattgtgttaaccgaatgtaaattgtatgtttcaacataccactattttactgcgccccgacgcgctcatccggatggaaggagataacatgtcagccttatcaactactggccataatgacgggatcactctccattgcttacagagcattgcgcaactcattcctctgtcgtcggcggttttttatcgtgttaatgcttatttaaagccagaagcctatgttttacataacatttctaatagcacacaccaacaatatctggagcattttcaaccattagacccgctatcgccttcccggttcggccaacaggttgttaccgtagcgacgatgacgcccggtatctgtgcccgacatcgccattattatcatgaatttatgctacctaatcatgtgtgcgacatgattgagatctttattcgtcggggccatcgtattatcgcgggcatttcattaatgcgcgatatacctttttccagcgaagagcgtttgcgagcccaggcagtacaaccattactgggactggcgattcatgattctcttcaggaagacaacgatctggagtcaatattgaccgccaaagagcgtgaaattgtgggaatggtctgcgaaggggccagcaacaaattgattgcccgtcagttgaatatttctctctcaacagtgaaaacgcatttacgtaatatttttgctaaaacagaagtgataaatcgcacggaactggtttcccgaaccagaatgtcttcggtacaacatgcacagcatatgtgaaagcgtgctttttaacccgcgtcaattgcgggtcttttccccattgtcatatatgcctgaattaataccactctctgatctgatgcctcaataaaatgtcatattatctggcgtcggtatcctgttgcagccattgattcatggcctgattgatcatatttatcacactaagcagaagaacacgctggtgccgctcaagccgcagataacggcgcagcggcggcattttacaaactacttcgctagcagcccatagctcaatgctgcaataccattccttatgatgtaaaaccagcgtaaaccgacgataatccagttcactcagtgcctgttgtaaattggggaaacaattaagatagttaatcagcccggcggtacttttgctgccagtaaaaatgacgggataacgtttcagccatccgggctgatgaacgcgaattttgccctgcaaaggataattgattgtgcctttcaccctgaattcacaactgtgaatactggccatgaataaccgtttttgctgagcatggcagataacctgggtaaatgcattcagatgcagcacggcgctatgttcggtcaatttttcacaacgccagccgctcaaatcacgtaacaccatgttcattaatgtgctcttaaaccaggggacggaggacatctggcgtcatctcttcattgtttcgcttttcataattgcccatagcccgttccacgacctcttctaccggaagcgggaggaaaggattaacccgttgcacacataatgtccagaataaggcataggcggcagtcaatccaagcataataccgaatggtataagtacatcccgactgttcattcctggaggcgcgatattaataatggcgataataatacccacgctcgaaataatctgaggtaagggaaaccagggggcccggtaagcgcgtggtaaatcggggcgccgaatacgtaagataacgaccgataacgttaccagcagataagctactccccaggcgcagaccgcagcgaggatcagcggaacaatgtggtcgatatcaccgttcagataccaggcatgtaaacagggaatcgcaacaccgaatgcgatggcgatgaccggtgttttaaagcgggggtgcaaccaggtcagaaaccgcggcaaagcgccgtccagcgccatgccgtatataatacgcggtactgccgccattagcgtattaatcgtcgcacatcccgctaacaacaaccccacgcccagccagtattgcccgacatgtcccatgacacgattggcaaaggcgggaatagccatcggcgtatccagtaaaaagatatggtttgccgcatcgaccaccacattatttacctgccggttaatcgcagcgccatagaggaacatacaacctgccaccgctaaaaggccaagcgccatcgctctgggaatcgtacgatgcgcttttttaatttccggcgccattggcgtgaccagttcacaaccgacgaacataaacatcgccatgccaatataaccaaacagaccagaaagattactgacatcaagcggtgcgccaaaccacccggaatgatgagtgaccggggataacaggatcccgcataaaccgaagatggtcagggtagtccacataccgaatgtaagaaacacttccaccttgccaaatacttcaacaccaatggcattcagtaacccgaaaaccactaccatgccgacgccaaccatccaggtattgtgctgcatggccacgtgttctctaacagactcaaagttcaccagcgccatgacgccagcgagaatcgtttctgccgtgccggcaaaaatgtgtacgatcaggtaagcgcaaagcgcaccggtgatagcgaaaaaacgccccatcccgcaggaaatatagtcgtagacggagccagtcgtgggaataagcgttgccgcttcggcaaaggtggtaatctgcgcttgcatcataataaatgccagtaataccgcaagagcaaaggtatctccccctgagccaaaaccactggtcacggtcaggatcaccgggcttgccataatcagcccgacggagctggcaagcgtcgtggggaaaccaataacgccacgttcaagatggctggcaagtctgtttttaaacatggtcaacctcttcactattattacaacaataaattaccgctccggaataacgcttatttatggcaggcaccgtatctaacaggtatcgtcctgaagagggataacggtaaataacgttgtgacgccgtccccgcatgcgctaatagcaagtggggagcgcgttattctccccagtgatgccaacgctactgacgaacaattaaaggattcaaccctgcttatggctttcaacttttgccagataatgttttacaaaacggggcgttaaaactttccatgccacttcggttccctgttcaacaaaccaactatcgcctggtgaaaaacgtatcggttcctgacccgcaacagtgagttccacttccccttccagcacggttgcgtgctcggtaaagggataaatcatagtgaaaccgccgcgggtcgatgaaaacagtccacaggtaaatacgtcctcaggtttaccgtaaatcatcgcaacggcgacctggggatcgccttctgttggcaacgcccccaacaggctgacactcccgattggctgtaattcaggaacaggttgattgagtttaaaagcttgcattaatgttctcctggttaattccggcctttccagaaaccggctgtttgatgtatcagttttcccgcactgaccagcaatagacgtagactgtcgcgaccataaattgtcgcgtggggaatgctactcatcagacgataccgctcggaaccgccatttattccttcggccaggattttgcatacaatatgggaaggcgtgacgccaaatccggaataaccctgaacataaaaaacattattgtgctcacgaagcgtgccaatctgcggaaacagattcgcgctacaggccatcggtccgccccaggcaaaatcgattttaacgtctttcaaataaggaaagacctccgtcaacagagtgcggttccaggcagcaaaatcgtgcggggtatattcaagaaaccttgtggcgctgccaaacagcagacggttttcttttgtgagacggtagtaatttatcaccgggcggatatcactaaaagccccgcgcaagggactgatccgctcaacaagctcgctggagagaggttctgtagagacctgataagaataagtaaccagcgttttcttataaatttctggttccagattattgagaaaactatcacaggcccacagcaatttggccgcttttacgctgcccatcgcagtacgtacccgcacagttttaccgtaactgacctcaaccacaggtgaatattcgaatatcttcacccccagcgaattcgcagcctgagcggagcccagcaataaattcagcgagtggacatgccctccccccatatgcttgagaacaccgcagtagacgtcggaaccgataacctgctgcacgtctttaccggtatagagttcaatatcgtcttccggcgtagcggctttgaattctttttcccattgttgcagcgtttttaactgccgctggttgtaggccagataaccatatccggggacaaaatcagcatcaatatggtatttacgaattcgctcccgaataatgcctgcgccgaggttcgagattttaaacagcgtctccattcccgctgcgcctacatattttttaacggcttcgatgtcgtgacctataccggccatcacctgaccgccgtttcgcccggtgccgccatacccaagatggcgggcttccagaacgacaacattagtgatcccctgctccgccagttccagcgcggtattgatgcctgaaaagccaccgccaatgatcaccacatcggcatcaatatcgtcttgcagagcaggaaaatgcaacgggtattttttcgtcgcgccgtagtaattcaacgcatcgatttttgtattcatcgcgttaccttgtcatcacgcttgactaagaccgctatcacagcacggtaacgttttacaaaatatcgtccggaagaatgacgttctttggaacgatattcagttccaggcaagtatgttgagatggaaaaacgtacattcctgacctacaggcacttctgatgagcgacgtgacattacttgccgaagtaacgacttttttacgccaacgacacggacaatttattgcaggtgaacgtcaggccggaaacggcacgaacttctcggtcactaacccagccaccggcaaaatcatcgccgacgttgtgtcggcaacccctgcgcaggcagaagaggccatgcagagcgccagacgggcgtttgatgtctggcgtaaaatgccaacgttacaacgcggcgcattactgctgaaactggctgatactcttgccgctcatcgtgaagagttagctcaactggaaagcgtctgttcaggtaaaacgattatgctgtcgcgcggtcttgaactcgatcagtcagtggccttcctgcgttactttgccggttgggcaggaaaaataaccggtgaaacgctgaatgtctccctgccatcaatgggagaagagagatacacagcgtttacccaacgccaacccattggcgtggtcgtcggtattgtgccgtggaatttctcaattatgattgctatctggaaactggccgcagcgctggtatgtggctgcaccatcgtcattaaaccaagtgaatataccccgctgacactgctgcgagtcgctgagctggctaaagaggcaggtttccctgatggcgtaattaacgtggtaaacggtgctggcggtgagatagcgcaacagctgatcgcgcatccagattgcgccaaagtgagtttcaccgggtcagtcgcgacaggtgagaaagtccggcgttcggcaacatcgtcaggaaaacgcgttaccctcgaactaggagggaaaaatgcggcgctgtttctcaatgatctcacggcacaagccatggtcaacggtattcttgaagccggttatctgaatcaagggcaaatttgtgctgccgcagagcgtttttatctgccccaggaaaaactggatacggtcatgacgctcctcagacaacggttatcggagatcgtgcccggctcgcctttagatgaaaaaacggtgatgggcccgctggcgaatcaggttcagcttgaaaaagtgctgcgtctgattcaacgtgcacgggaagaaggggataccattgtttatggcggtgaaactttacccggcgaagggtactttttacagccgacagcggtaaaagtgcgtagtaaaaacagtacgctgatgcacgaggagacctttggccctgtctgtagctttatcggttatcagaatgaaaaagaggcgctttcgcatatcaacgattcgccattcggccttgctgcaagtgtgtggtcggaaaatatatctaaggcattacgctacgctgaagatattgatgctggcatggtgtgggtcaatatgcataccttcctcgatcccgcggtaccctttggagggatgaaaggatcgggcataggtcgtgaatttggcagcgcgtttattgatgactataccgaacttaaatctgtcatggtccgttattaaccatcctgaaaatgatgcaggcagatcaaccataccgaaaggtggactgtctgcctgattatcaggttcgctcgctgcgtttttttgcttttgggataatgttaaacgcccggcccggcgttccttcctgcattactagcgccatctaccgttagagtaggctatctccagccttaacggttcagactcatcctgtaacatcgcttccaaagacaacgccagcgtctgatgatgggcatcttttacactgactttcagcatattgatgctcggttcataacgtaaaatagcagcgcgaagctcacggcaaaaccagttgagaacccgtttgtcacccacattcacctcgtgccattccggcataccccgagtgagcagcggcggtaatgtctcgccacctggcacggcgcaagagttgaataaacacattaacttgcgtcgtaccaattcatgtgggcttatcccctcaaccaagagcctgtcgaatagcgcgaccggaatggttggtgtcatcatcatttccctatctggttcatcgccagatcccatactgacgttctggactcctgctgagcgccgtctgatttctcggcagtgatttgccattcgattttcgtgaagttcagcgacatcgtttccaccggcttaccgccggcgccgccgctaacactgagttgtgatatcagcacgtttgtcagggtataaacgataagcgaccgcattttgccgtcgtcattgcggcacaacgtcagcaccgcggttctaattagcctcccgctacagcagtactcattgagcacaggcgtggcgaggtcgacaaatttggtgagcgacatttcaccaacatgcgcgcgcccggaagtccgctcagtgaggctaacatcgttatttacctgcattgccacattgtggctataagacatgatctctatctgatcttcaaagccttcaacctggctttcgcctttgatattgtcgagctttaaaaaaatcgcatccatgatttatctccttgttgatcaggtggcagttcagcagccagacgaataccggcggccagcgcttgtgactcttattaaaagcgcaacgaccaaaaaacacagcgtgaaaagcgccaggtttgcagggattttgccgacgtttacccacgtctgatgaacgttattccgctggttgcaaagcaatagagggttttggcccgctgtggccaaatacaattgaggttatactgaacgctctctgccatattcaatcccttttatcgcaaagtatccctggtgccggtatcacagcgtcgttattcaaaaattgacatttcagaataataatcagctatatataaaaaacacatcaaaaagcaaatatcaacttaatttttacttatttaataaaaaaatccaaattgatttacatcaattaacacacacaaaaacattaaaaatcaaagggttaaatgaaaattaatcactatggaaattttatttttcttaatactcacattataaatgttatttgcttattatcctgtgaaaactaaaaaatgatttaaatcaaaaaacaaactattctcgttgattaacgttttgaccgaaataaaaaagattttatacgtcccgggatagtctccctttctgatggacaatatgcattaacgagcgggcaaacaggtaacttctgcccgggtaatccgttacccgactgatattaacattgtcatgaggtgatatcatttgcccggccagccataatcatccggaaccggcgctacgccacgaacatcaggacggagcattttttgtcgatcctcttcgtcatccacccagacactggctatctcttcacaggttgcaaaccatacgccatcatgccctttaatatgttcaatcaaacgtaacaacatcatcatatgatgcccatgaccgattatctgcggatgaagagccatcgcatataaactgttttcctgatggtgataagcataggtaaaaatatccttccagcgtcgcagaacaccgtcagtatcgctcatcccctcctggttgccggtatacgccagtgcgggaaaatcatccagataccagctaacaggaatttccagaatcgcgctggccgggcctgcgatatttcccgtctcccaattcacctgccaacgttgaggatggtaaggcacaagatctctcgccatcaggctactgtcatagagaaaaccggcttcctccagaagatccagcgtattctcgctataatcccaatagggagaacggtatcccacagggcgtatgccgaaatgtcttttataacaggcgaacgccagatccataagtcggcgttctgtatcacgattcaccagcgtcggattttcatgatagtagccatggtgagcgatttcatgcccggcatcaaaaattgctttaatgatttccgggaaggtgtctacagtgtgtccgggaataaaaaaggtggttttgatattattttctttgaacaatttcagaagccttggtacgccaacttgagcaccaaactctcctcgtgacataaaggatggcgacggtcgattaaatccgcccagccataaagactgagcatctacatcaacaccaagattgaccgcaatccttttaccctcaggtaattttaaatatcccataacgacctccagctaatacatagaagggacacattctgttatttaatgtgtgatggccagatattatatatgcctgcttttctgcgtctgtccttgaacgttgttgctgcccccccaagtctattttcatatagaacatcgaggttaatttctcctgaaatgacatcctcttgattgacgtgcgcctctgcgataataccttgtggatttttccacacgacatcacaggggcttaaaattgaacttcgggcccagcagcctggcagtggcccgcccgggtttcctcccaggcaacagtgaacaagataaatttgattttcaatacaacgtgcgtggcaacaatgcctgactcgccaaaatccctgttcagtaaacgtagcggaaggcgttaaaattaactccacaccctgttccgccagcgtcgcggcacactccggtatttctgcttcataacaaatattaaaacccacctttgcaaatggcagttgaaaaacagccattttatcgccttcctgagtataccaaccccgttcagccgggaagatatgcgtcttactgtgagcataatgttcgccatcgggtccccatatatgcgcaacattctcatagcgatctgctccagtctgctccagatgagagccagcaataatgaactgtcctctttctttcgcttcctgttgaaaaagctgcttataggcatccgtgaactgatcaattaaagtaaggtgtgaaatgggtctttcttgccattttttcaatagtgtaaatagctcaatggtaaatagctccgggaagataacgacatcagctccctgacttttattaagaagtatccttacctttgttatgaaatcttcaaaagtgtttatttcggtaacaatatactgacaggctgaaacagtaaaattacgtggcatcgtgatatccccggcatgaaatttaaacttaaattaacgtatagcgcatggagaatattagggagtggacattacgacatcaggttattttttgtgaagctgcgcaaaatatatggagaaaagagtagaagcattgaacctttatttacataaaggggactttatcgatgatcgcagcgagacagagagtcgataaaaatccaggcgaaaaacaataacccttaccacaatattattttcagcatctgaaaataatcaggcaaactaaatgataacgcgctggtataaaaccaacgcgtatttttaccgataagggtaatgaagacggccacccgaaggtggccgttagaacccggtagcgcttcgcttatcaggcctgtgaaaccgagacagctttagcggtgagacgccagcggctgttccgtcattggcgggtggtgcttttccggatctttaatcagtacccacaggatgatggcgccgataatatcgaacagactgagtgcaatgaagaacgggccgtaaccgataatagcgaccaatgctcccataaacaggttgaagcttaactgtcccatccatgccgcagatcctgccagaccggcaaccgtcgcgacctcatttttcttgaacaggtcagcgctcatggtaatcacgacggtagacagcgtctggtgcgcaaaaccgccaatactcatcaatgcaatggcgacatacgggttagtcgtaatgctgacaaaaccgatcgaaatcatcaaaacagcgccgatggtaaagctacaacgacgcgcattgatcgtggtcatgtgcatcttttccatgaagaacttcgccaggaaaccgcctgcaacgcagccgaagtccgccgccaggaacggcagccaggcaaacatggcgatctcttttaacggcagatgcatcacgttaatcagatacagcggcatccagaaactcagcgttccccatgccgggtcagcaagaaaacgggtaatcgccaatgcccagaagttacgctttttaacgatctctttaacggccggttttttattatcgtcctggagatagctttcctggccgtcttcgatataacgcagctctttgtgggtgatccacgggtgtttatttggcgagttataaatcaggaaccaggtgatggcgaacagcacgccgatcccaccggtaatcacaaacgccatttcagtaccgatgccgctatcagcaaaggtcagcatcgcccagaccaccagcggcggcgccagcatcgcgccaattgaagtaccgatattaaacaggccccccgcaataccgcgttctttcgtcgggaaccattcggcgctggctttaatcccggccggaatcgctgacgcttcggttagccccatcagaccacgcagaaatgccagacttatccagccgccggccagcgcgtgcgccatgttgatcagcgaccacaacaaggcaaagataaagaagccgattttcagtccgatgacatccatcaaatagccggtgatcggctgcgcaatggtgtaacaaagctggaaggcgctcaccacccaggaatattgttgctcatcaaaatggagttctttcatcatcgctggcgccgcaacgctaagcgagctacgggacaggtagtttacgatggtccctacgcagaccaggccgataatccaccatcttaattttgtcatcttcatgataaagcctcgttaaaaaacattagctccgcgccgtctgacctgtagcgggaaaactgaaatcacaaaaattggttgaccaatcaatattttctcatccggaccggtcaaaatctggcggcaactcccgcctttaatattcttgaaataaatacatcaactcatttcaagttgaatggtgaatgctttccacccagcaaaaattgacacagatcaaataaataaaattggcagaccgtgaatgatgatatttgtgatttggttagccaatttagacaataaggttgacatgagaaaaattttggttgaatttagggggcagaacgggtttacaaagcacgtttcgaagttggctggcaatgggtcaaccacgaagacgttatcgcaagaagaggaaacgagatatgaaacaaacctggcgctggtacggacctaacgacccggtaacgctgtcagatgtacgccaggctggcgcaaccggcgtggtaacggcgttacaccatatcccgaatggagaaatttggtcggtagacgagatccagaaacgtaaagctatcgttgaagaggcgggtctggagtggtctgtggtagagagcgtacctatccacgaagatatcaaaacccacaccggtcagtacgatttatggatcaaaaactaccagcaaacgctgcgtaacctggcgcaatgcggtatctatacggtttgctataactttatgccggtactggactggacacgtacggatctggaatacgtattaccggatggttccaaagcgttgcgttttgaccagattgaattcgccgcgttcgaactgcatatcctgaagcgtccgggagcagaagccgactatacggcagaagagattgctcaggcagagcggcgtttcgccaccatgagcgaggaagacaaagcacgtctgacccgcaacattattgccggtttacctggcgcggaagaaggctatacgctggatcagttccgtcaacacctggcgacgtataaagatatcgataaagcaaaactgcgtgaacattttgcctatttcctgaaagccattattccggttgccgacgaggttggcgtgcgtatggccgttcaccctgacgatccgccgcgccctattctcggcctgccgcgcattgtctctaccattgaagacatgcaatggatggtggaaaccgttaatagcatggcgaacggcttcaccatgtgtaccggatcttacggcgtgcgcgccgacaacgatctggttgatatgatcaaacagtttggtccgcgcatctactttacgcatctgcgctctacgctgcgcgaagagaatccgaagaccttccacgaggccgcccatttgcacggcgatgtggatatgtatgaagtcgttaaagcgattgtggaagaagagcaccgtcgtaaagccgaaggtagcgacgatctgatcccaatgcgcccggaccacggtcatcagatgctggacgatctgaagaagaaaacgaatccgggttattccgccattggccgtctgaaagggcttgcggaagtccgcggcgtcgaactggctatccagcgcgctttctttagcaaataaccttctttcgcatggcgcgacgcgtcatgcgatttcccctactcaatgcaatagcaacatgcctcgccccggagatcgcgggcgaagacgtcgaatgacaggagtttgcaatggaacagaatatcgccaccgcccaggtttccgtcgcccgcccaaactgggacaaatcacgtctggtatcccgtattgtgcatctgggctgcggggcgtttcaccgcgcgcaccaggcgctctttacccatcatctactggaaaagagcgacagcgactggggcatttgtgaagtgaacctgatgccgggtaacgacgcgcggctgatcgcgaacctgaaagcgcaaaatctgctgtacaccgttgcagaacgcggcgcagaaagcaccgaactgaaaattatcggttcaatgaaagaagcgctacaccctgaattcgacggtcatgcagggattctggcggcaatggcgcgcccggaaaccgccatcgtctccttaaccgtgaccgaaaaaggctactgcaccgaccccgccagcggcgagcttgatgtcaataacccgctgatccaaaacgatcttgcccatccacagcagcctaaatccgccattggctatattgtcgaagcgctaaacatgcgccgggagcaaggactgaaagcttttaccgtgctgtcgtgcgataacgtgcgcgagaatggtcacgtcgcgaaggctgccgtcctcggcctggcgaaagctcgcgatgccgccctcgccgcatggattgccgacaatgtgaccttcccctgcaccatggttgaccgcattgttccggcagcgaccgaagagacgctacaactggttgccgaccagttaggcgtttatgatccctgcgctatcgcctgcgaacccttccgccagtgggtcatcgaagataactttgtgaatggtcgcccggactgggataccgtcggcgcgcaattcgttgcagatgtcgtaccgtttgagatgatgaagctgcgtatgcttaacggcagtcactctttcctcgcctatctgggttatctcggcgggtatgacactatcgccgatactatgactaacccggcttaccgtcgcgcggcgctggcgctgatgcttgatgaacaagcgccgacgttgtcaatgccggaaggcaccgatctggaagggtatgcgaatttgttgattgcgcgtttcactaacccctcgttgaaacaccgcacctggcagatcgcgatggatggcagtcagaaactgccgcagcgtttgttggacccggtacgtctgcacttgcaacagggcgatgactatcgccgcctgacgctgggcgtcgccggatggatgcgttatgtcggcggtgtcgatgagcaaggtaaaaccattgatgtcgtcgatccgctgcttgcacagtatcaggcgattcatcagcaatatcagacgccggaagaacgcgttcgcgggctactggccatcgagtctatctttggcaacgacctgccgaagaaccacgaatttgtgcaagccgttaccgacgcttaccaacagctattgcagaatggcgcgaaagccacggtagaagcgctggctaagtaaggagataaatcatggctacgtttatgactgaagattttctactgaaaaacgacattgcccgcacgctgtaccataaatacgccgcgcccatgccgatttatgacttccactgccatttaagtccgcaggaaatcgccgacgatcgccgtttcgataacctcggtcagatctggctggaaggcgaccactataaatggcgagcgctacgaagcgcaggcgtggatgagtcgctgatcaccggcaaagagaccagcgattatgaaaaatatatggcctgggccaataccgtaccaaaaacgctgggtaatccgctgtatcactggacgcaccttgaactacgccgtccatttggcattacaggtacgctgttcggaccggataccgcagaaagtatctggacgcagtgtaatgagaaactggcgacgccggccttttccgcgcgcggtattatgcagcagatgaatgtgcggatggtcggaaccaccgacgacccgatagattctctggaatatcaccgccagatagccgccgacgacagcattgatattgaagtcgcgccaagctggcgccccgacaaagttttcaaaatcgaactggacggctttgtcgattacctgaggaaactggaagcggcggcagatgtcagcattacccgtttcgacgatttacgtcaggcgctcactcgccgcctcgaccatttcgccgcctgcggctgccgcgcgtcggatcatggcattgaaacgctgcgatttgcgccggtgcccgacgacgcgcagcttgacgccattctgggcaaacgtctggctggcgaaacgctgagcgaacttgagatcgcccagtttaccacggcggtgctggtctggctgggccgccagtacgccgcgcgcggctgggtgatgcagctacatattggcgcgatccgtaacaataatacccgaatgttccgcctgctggggccggataccggctttgactccattggcgataataacattagctgggcgctctcccgtttgctcgacagtatggatgtgaccaatgaactgcccaagactatcctctattgcctgaacccacgtgataacgaagtcctggcgaccatgatcggtaacttccaggggccgggaattgccggaaaagtgcagtttggttccggctggtggtttaacgatcagaaagacggtatgctgcgccaactggagcaactgtcgcaaatgggactgttaagtcagtttgtcgggatgctgaccgactcccgcagtttcctttcttatacgcgacatgaatatttccgtcgtattctctgtaacctgctgggacagtgggcgcaggacggagagattcctgatgatgaagcgatgctaagccgtatggttcaggatatctgcttcaataatgcccaacgttatttcacgattaaataatcgctattaatctgtgagcacaggtttcaggtattttgagaggcaggaaggcggtaagagagtgagaaatttagcagtaacgcacttttccagccaaagtctggccgccgataaaaagcaaagaggttactgattaatcccgaatcacttactaaggtaagtgattcgggtaaacaaacacagccatcttctgcgtcatgctttttttctctgtccggaataactccagtgcagaaagagtgatacatcagtcctgttgatgatggatcctgtgggttatacggtaataacttatgacttcacagtgtggtttcttttaacaaatcgacagccagcatttccagctggttaaccacctcattactggatcgctccattctgtcgagttcttgcgacatcgcattcatatcgcctgcggcaaaatagttcagcgcagagtgaccagcggtatgcacctctttatgcggcgcttccagactacggaaactgtagtaattgctaaactgctgcccttcaaaaccgtagtaccatttccccagccgacactgatcgtgcatcgttattttactgtttatgtctttatttaagagtaatttgtagacttccattttccagataacatggtcaactttgacaatattcaaaaactgcaccgtagagatgtactgcatgaccgatttcatgctcagcgatttatcgatgacgatgccaatagactccacaatttgatttatgttagtcgtaatattatcaataaccggctgttggttatccagcacctcactcactctggccgtattatctttgattacagaggttaacgtactgacgcttttcgaactgtgtttaacatcttcggacaggtttttcacctctttcgaaataacgctaaaaccacgcccggcatcccctacgcgcgcggcctcgatcgcggagttaatcgctatcaaattggtctggttagcgatcttctgtatctctttaatacacgcattaatttgcgttaaggaggtatttaagtcgcccatacgacagccaatatccgatgaagtcgtgccaatttcggtgataaattccacgagcgattttaatgaacttctggctttatcattctgttcattaagttcattaatgcgttctttttcaatgttgagctgctcacaggatttaatgatggcattacgaatgatatcgatcgtcgagatccccatcagaattttttgacacagtatccgctcataaggctcaggagtatccaccaccacgtcagacgcattagcgccagattctgctgctggcggcggtattttgacaacattattattccagtggcgcaagcctaatacttttttaaacatataccattctccttattatatgtggacatcctgatctatgcccggataaagtattatcaactcatgctaacataatgaaaaatcggctgtcatctgccataaccatacgctcaccagaataagacaaaacgtccaccaaacttaaataattacaaggtaaactattcaacaataccattaatagtcatgatggaagtcgcttcgctttatacggaaatattatttacaaggctgacaataatagctgaataataattaactgcatttacttaggtgtatctatatctcggcccgaagattgcaaacagggtttaaacgcaaacttttgcaatagaaaaataacctaacgtaaactttttatatgaccaataatatcatttggactcatcaatatattatgctgtccgtttaccagccaaacaggcatgacctaaatccaaaggaatgggggcagcgtaaccagccgcaaaaagtatcgattagtcgaaaatcaggaaacggatgcgccaacgaggcgagcgtcaccgcctgcgtcagaaaagttaagaataatttgtgatattatttctcatatgttaccagtaaatggcaggctgatagcccttcgctggtaaacacaacaggcgggatatcggcacccacgccgatatcccgacgagaatgaccccgttacgctttgatgacgattaacggttcaatatcgctctcttttttaatgactaatgaatcatcgccgcgcaggcacgtaccgccgtagttaccgcccacggtaaacgtacagacctgaatatacttcccggcgaccttcggcaggcaccacaactgctgatagatatttttctgcgtggcgaacttgccgctggttttatccagtagctcttcctgatggctcaccaaatcgatattactaccgcaacgtccggctatcggttttaccgcatagccggtctgcaccagctcatcgttaacggtaaaatccgtgtcgagcaaatagcgatgatgcgggaacagcgaccacaggataggcaggatcgctttgttgcccgggatcaccgtccacagcggttcaaacaccaacacttccgggcgcagtaatacatcaatcagccggacttcattttccgggtgcccggtacgaataggcactgcggcatactccgtctcgctgacttcgcgtatctgctccatcgccgtttcccacgcccaggttttccagacacaattcaccagccgtccgtcgccatcgatcaactgcccggcgtcatcccagcgcaactcgcccagcccgcggaggattttgctcgcgaagccggcctgatgcagcgcctgctgcataaactgcgcgtgatagtcctcctcgatatcatcatcctgcatgatatggacgaaaggacgcgctttactgtgtttccaggcgcctgccagctcgttaattaagccctctgccgggttatgccctttaccggtatagccctgctcagcccatttttcgagaattaatcccgcttcggtatggcatgatgcggaatcggcattgtattcatagactttcagcccgcgttcatccatgcagaaatccatacgaccggtgatcatatggtgacgacggcgctgccaggagaggcgcagacgcggccaaagaattttggggatatcgaatagcgccagcagattatcgtcttttaaaactttgtccgtggcgtgcaggtacatcaaatgcaactcattggtcgctttgataagctcctgttcagcgctctcggtgatggtaaaatactggtacgggtcctgattgataacgtgcccgttcgcctgtacataggctttttgtaacggatcgcgctcatccagccactgaccgtcaaactgacctttctctggcagtcttgcgccgcgaatcgccagcgactgattcgcgatgtcaggctgtgacaaactgtattgcgtgtcgtcggtctggatcatccagcctaaaatcgtcgtgtcatcaaaggtgtcgcgcagggtgtaacacccgttttctacgaccatttccagttcgcgagtccactgctgccctggcggcaatggcgtgtggataacgttttgctcagcaatacgaattttgttatccaggagttgggtgataatcgcgacgtgcccggtttcgttaaactcgccgcccttttgccagatgagcagcgccccggcctccggcgcgcgcggcgaaccgttcgggaaggcctgcaaaggcaaaatattgtcattcacgacctcgcgcagaaaacgtagcgagaagatttcccaggccatgccgacgtcagtaaaaacaacgccataattcagaaagagaaaacggcgggcaaattccacgcactgccatttatgccccatgtattcatcgtcgatgtagctacgaaaagctgcgtcgtcgtcgtcccacggatcgagggaattgtaatctgaagagtagatcgctacgccgccgggggcgtaacccaataatgtcccgaagggggcatcctgactggtggttcctttgctcatgcacttacctcaaaacaagaccgcctgagcagcctggcgtgatttcgctctgattgtctgctctgtgacactaaccggacagaggtcgacataatcatacacctcaataaggcacactgaggccagaaggttaaaatttcactcgccggaatgtcccaatcggttaaatgtccggttagcaagctgctacactgcttcaacaccaccactgtgaaggcaggtcaatatggcagataatacttatcaacccgcaaaagtctggacgtgggataaatccggcggcggcgcgttcgctaacattaatcgcccggtttccggcccgacgcacgacaaaacgctgcccgtcggcaaacatccgttacagctttattcgctggggacgcctaacggccagaaagtgactattatgctggaagagctcctggcgctgggcgtgaccggcgccgaatatgacgcctggttgattcgcatcggcgagggcgatcagttctccagcggctttgttgacatcaatccgaactcaaaaatcccggcgctgcgcgataactcacacaacccgccgattcgagtttttgagtcgggcgcaattcttgtttatctggcggataagtttggccatttcctgccgcaggatctggctaagcgcacagaaacccttaactggttgttctggctacagggcgcggcgccgttcctcggtggcggtttcggtcatttctatcattatgcgccggtaaaaattgagtacgccattaatcgcttcaccatggaagccaagcgtctgctggacgtgctggataagcagttagctcaccacccgtatgtcgcgggagaagagtacactattgccgatatggccatctggccgtggttcggcaacgtggtgctggggaatgtctatgatgcagcggagtttctggatgccggaagttatcaaaacgtacaacgctgggcgaaacaggtagccgaacgtccggcggtaaagcgggggcgcattgtcaaccggaccaacggcccattgaacgaacagcttcacgaacgccatgacgccagcgacttcgaaaaccataccgaagataaacgtcaaagttaaaccataatgccggatggggtagtaatgtcgtcatccggcatggtattccctgctgacgcttcgcttatcagttctgcgagtgcgtcatattcggcgcttcactaaacccatgttgcatgagaatcaacctcgcccgtgctgacagtaaaaagtcggcaagcgtttttccctgctcgctcaggcaggcaaagccatattcagccacgggattataaggttccgggatatcaaccactcgcagcgaattaacctgccgtagccagggagcatagctggcatagccgataaagatatcggtgtaatcatgattgatgagccattccgctgccagccggcccgccggtaacggcaaagtctgcctgccgccaaccagcgctaccgcgcgttttcggaccgcttcgccctccttgcccatccgcgaaaaaagctgctgcgtataatcgccggaaggatcgcaacctgctgttgaggtgccgatccgcagatcccgccgggttaatagcgacaaccagtcctcgccttcacgcatcgcctgtgcccgcacgctcaggcacaaacggttcgtcgtaaaaggcgcgacccgcagcgcccgcccgctttccagcagcgcctgcggatgcgccaggttcgccgaagcaaaaaagtcgcacgcttcgcccgcttcgatgcgttcacgtaacagccccgccggaccgaaatcacataccgcatccgcctgaaacgccgccattagctgcggccagacgacgcgcaagctccccgcagccagtattcgcattattgtacgccctgatagtcagtacggtaaaaacgttgataccagtcgttagcggccttttgcatgtcaatatcgtggaatttttccggatagagttttttcgccatccacagttcgccgattcccaccgcctccggcatcggatatccccaggctttggcataatccggcatcaggtaaacccgatgatgcttcaccgcgtcaatgacctgccactggggattgtgcaggatctcattgacgacctttggatagcgattctggacaaagatcacctgtggatcccaggcgatcacctgctccattgtcacctgcttaaagcctttcaccgaggatgccgctacattcagcgcccccgcatgggccatcatcagaccggtgtatttaccggaaccgtaggtggtcagctccggattcgccatataggcgcgaactcgctcattttcagggaccgactgcaaacggtcgctgaccatcttgcgacctttatccatcgcctcaatcagcgctttcgcctcttgcggtttattgacgatatcgccaatcagcgttattccttcacgcagcccgcgattataagcctgctcttcatcggccagggtcgggttcattttagcctgctcgccagcaatatcatggcgcagcgaaatcgccactaccggaatgccaagacggctgatcttgtcgatcatctcctgcggagcgtaattcgtgacaaacaccacctgcgggcgcagcgccaccagtttttcaggatcaacgtgcgttagatcgcccagcgaggctttttgcgccagttccggcgccagacgcgcatagccgtcgcctaattgctgtttccagttcgccatgaccccaacgattttgtcagtggcattcatctgtacaaggagattgagcgtttgatgctggagcaccaccactctgtcgacggtgtccggaaccgtgacctggcggccaatttgatcggtaaaagtacgcgccgcctgtgacattaacggccagcaaaaaagcaacgccagcagagagagctggcgcaaaaatttattcataggtttcgccccataatcgatatataaataattatataacgattatagagcgatataatagaggtgattaagggatcacgcgctggtgatgtcgtactccatgcggcgcagcgcatctaacgtggctttcgcttcgtcttcgtcaatgatgctcatggcaaaaccaacgtgtaccaatacccattgccctatcagatcggctggcttaccttcacaaatcagagcaatattgacatcacgtttgatgccacacacttccacctgcgcaagctggtgaatatcatctccgacggccagcacctgaccggggacgccaatacacataattaaccacctgaaataaaatgcgggttattcgacctcaatactttttactttcaacgaatcgccggtatccacccgcaggcgatcgccatgacaatgcggacattgcgcgtcatgcctgagaatttccaccacctgactgcaatcccagcaccaggcctgggccggtctgtagtcgatgtgcaattcgcacccttgcgctaaagtcccctggcaggcgatatcaaaactgaaacgaaccgcgcgctcttcaacgcacgaaagcgcgcctatctccagccatacgccggtgacgcgcgccacgccgtgctgttctgcctgctgctgaataatttcaacggcgctttggcaaagagacagctcatgcattctcacagctccgacggccaaacagcaacgcacgccggcttgtctgcggcgcatcaggattgcttaccggcagagataacagcatccgcgcgcagtcatccgccagccggacgccctcttccggcgacaggctacgggaaagcggcgacatcaacgagcaggcaagatattgcgaaacgccttccagttcgccaacggtaaaggtcatcgtgccataaggcagttgcagaccgagtttttcaccgacggtacgcctgggccagatctggtccgggccagggaagattaatgcgcttaacatccacggcgtaattaccgtgcccgtccattgtccttcaaataacgtaaaatcagagacatgcactggcatagtcggatgcagaaacgaaagatcgtgcatcgaacgatgggctatctcttcaaacgccgcctgaacccgggcgacgggcgccgtgtcgaatccggaaaacgtttcagacatgcgccgtctccttaggaattgcttcgacgccggattcacgcagcgcagcaagaacctgctcaagcgcaggctcaatcatcgcctcgacggttggcgttaagccgatgtgcggttccagcgactgtggaataacgccaaccagggtcagtttcttcggaaactcgccggtaaagcggagggccgacaatacgtcggccagtccaagctgatggggggagattttgttggtgaacagcgccggaacttcatcgtcgcgcagtaccataatggttcccggcgcgttctttttcgacacgatggcgtcggcaatgatcaaatgatcacgattcgccatatcgccaagaagttccattcccgccgtaccgccatccagaatctcaacgaaatccggcagggtgtatcgttgctctaacgcttcaacaatacgcaccccgatggcttcatcggtcagcaaaatattgccgacccctaagactaatatccgcattacaaaaccttcaccgagaccacttcattgccatcggcgtccaccacgtgtaccgcgcacgccatgcaagggtcgaaggagtggatggtacgtaccacttccagcggcttcgccggatcggcgatcggcgtaccgaccagcgactgttcgtacggccccacgtcatcgttgaagttacgcggacctgagttccaggtcgatggcaccactgcctgatagttactgataataccgtctttaatcaccatccagtgagacagcataccgcgcggcgcctccaggaagcccacgcctttgaactcgcccgtcgccggaatgttcggcttcacaaacgtggtgtaatcgcctttgccgatatttacaatcagcgcgttgtattgatcctgcaatatgttttgcagttcacaacagtgaacggtacgcccgatgatacgacccagcgtagagtgaagttgcgccatttccagcgttttgccggtcagcttctgataaagcgcaatgatttcattgagcttggtctgcgtggattcacgacctgcagccagtttacacagcatgttcgccagcggcccgacttcgacggttttgccgtagaatgtcggcgacttgacccatgagtatttaccgtcatccgaccaaccgtcgtaagccgggatcgtagtgccttcccacggcgcctgcggcgcttcatctttgtaccaggcgtgcttcgcgctctcctgaatacctttaatcaggaactcgtcggagtgagaggtgatcggacggtatgtcgacagatcggcattggtaatgtaaccgcccgggaacaggaaactgccgtttttaccgtcggtcgggaattccggcgcgctcaggtagttcaccgcgcctttgccacgctccagccattccggatagtaggccgcgatgactgcggtatccactttatacacctgctcgacaaaatcgctcagcttatcaataaacgatttgatgtacatcaggcgttcaaggttcaacgtaccgatgctgtcgagattgatcgggttcgccaccccaccgaccgccaggttctggatatgcggcgatttaccgcccagcaacgccaccacgcggttagcgtcacgctgacattccagcgcctgcagatagtgagcgaccgcaatcaggttgacctccggcggtaactgcattgccgggtgcccccagtagccgttggcgaaaatacctaactgaccgctggcgacaagatccttgatcttgttctgaactttcgtgaactcttgcgcgctgttcaggtgccagctcgacacaccatccagcatcgcggaggctttttccggatcggctttcagcgcagaggtaatgtccacccagtccagcgcagagagctggtagaaatggacaatgtggtcatgggtggtatgcgccgccagaataatattacggatatactgcgcgttgacgggaacatcaatattcagcgcgctttccgccgcacgaacggaggagatcgcgtgagttgtcgtacaaacgccgcaaatacgctgcacaatcatccacgcatcgcgcggatcgcggttcttcacgatctcttccataccgcgccacatggtgccggacgcccatgctttggatacgacgccgttctcaatttcgcagtcaatgcgtaaatgaccctcaatacgggttaccggatcaatagtaattctctggctcatgctttgctcgcctcatgacgattatgatcgttttgttttaaaggaggaagtatcggcagtagacgaatgagtacgatgtatgcacaaatctcaatggccacaaaaccaatagaaatcaacaattcttcccaggttgggaagtagtggtagccgccacccgggttgaatgccaccagcgaataggtcagacgccacgtcgcgcagcccaacagcgcgctcagcgccgacaggtacagcatacgagagtcattacgcagtttcgccacacgcagcaccactaacgggaagaccatcaggacgacttcaatccagaacatagcggagtaaaaatcgccggcaaacgcataggacagcttgtcgcgataaatcagttcgccaaagcgcaggacgacgaaaatcgccagcagcacgctgatggtattcgtcagcttaacaaacaaatttttctcatccggaccgtttcctttcaggcctgcctgaaccagcgaaccctcaaatatgacaatggagaagcccatgataaacgcggtcagaaccgagaacagcggcagcatttcatagctttgccatagcggatgcactttatagcccgccgagatcatcaatgaccccattgaggactggtgcatcgtcggcagcagcgcgcccagcgcgataataaagaacatcaccttattcagacgcttgagcgacactttccagcccagacgttcaaacagggcaggcgcaaactccagcgccatcacgccgatgtagatggtcatacagaccgccgtctcaaacagtaccgagttcacgttgaagtgacctggaatgtagaagtacggcaggttccagtaacgaccgacgtcgatagtgatcgacaggccgcccagcgagtaaccaaacaagcttgccagcaacgccgggcgcaccaacggatggtattgcccacggttaaagacatacaccgcccatgccaacgcccaaccgccgcaggcaaagccggtgccgatcaacaggtcaaaggcaatccagacgccccacgggaaaccgccgttcaggtcggaaacggagcccaacccgaagaccagacgcttcacgataaggagcatacacaggacgattaacggtccaaaaataatgaccggtttactgatgatttttccgcccagcggttttggatcatgactcatgatcgtctcctccatcgtgatggtcgtttttgctattacgacgaaccagcacggttaagcccgccagcgcagccaggggtagtatcatgcctttataaagcgtgtgttgaacatgctcggagcgcgctccggttgaaaggtcatccagcttcggcagatccagatcttcataaggaacgcctgtcagcaccagcacctgagtaccaccgccctctttttcaccgtagaggtgtgggtagtatttaggcaccgtatgcagataggtgtcgtccgttttcaacgtctggcgcggatagtgatattcactgcctggtttgagggccagacgttttttcgcttccgccatcagctcttcacgagtaccgaaaatgacggcccctgccggacaaacttccacacacccaggcaaaccgcctttatccagacgctcaacgcctttctggttacacaactcacacttgtgaagcgcgccaaacgggttgttgtagtcgtacttaggtacgttgtacgggcaggcaaccatacagtaacggcagccggtgcagacatctttgtcatagtggacgatgccggttttcggatcttttttcagcgccgacaccgggcaaacggaaacgcagttaggatcgacgcagtgcatacactgtttcttgatgtaggcatagccgttctcttcctgatctttgttcacgcccgtaccgctacgccatacctgaataatgttattggtatacggcgacagcttgtcgttgttcgaccaggtctgctccccttccgggttacgcgccgggaagttgatatcctgacactttgtgacgcaggcctgacagcccacgcacagagtggagtcatacagcatacccagcgaacctggaatcggcggacggttttctgcagccgcatggctgacagacggcgcggcgcccaacagcaatgctccaccggaggctgctttaataaagtcacgtctgttcacggttattctccccgtgagtcagcgttatctttcttttgctgacgccccagttcacgtaccgccatcacgctgacgccggcaaccagaccgactacgccgccaagcagaccgacagcgcccgcagagatattgccgccttctttcatattgacgtcaggtttctctgaacgcggagtttggttttcgacatgagcaagctggtgaatgcccttatggaagccgataccttcttcgttacagccatagcaaggatgaccgatcgccactggccagacgccgccaacgtcacagaactgtaacgtagaacagttgccccaggtttccggccctttacagccaagatggtagagacaccagccctgacggtggccttcgtcgccaaattctttggcaaaacggcctgcgtcgaagtgtggacgacgttcgcaatgctcatgaatcagacggccataggcaaaggttggacgatttttcgcatccagcttcggcggcgtgccgtaagtgatgatatgcgcgacggtcgccaggaagttatgcgggtttggcggacaacctggaatattgataaccgttttgcccggtaagacttcctgcagactgacagcgccggttgggtttacgccagccgcagcaacgccgccccatgccgagcaggaaccgatagcgataatcgcggctgcgccatcagcggctttgcggatgtgatccacgatcggctcgccggcaaccatgcagtagataccgttatcttttagtgggatagaaccatccaccaccagaacatattgccctttatacttctccagagcgttatgtttgttttcttcgacctggtgaccgaatgcggcggaaagcacctcgtggtattccagagagatggtctccagaacgaggttttcaacggttgggtgtgtagcacgaagcagtgattcggtacaaccggtacactcctgagcgccaatccagataacgggcggacgctgtggattggataccgattctgccatttctgcggcggctttgctactgagccccatagtagcggccagtgctgcacaaagcttcatgaaatcacgacggttaatgccgtgagaagtgatgagagtattatctccagtcattttatagttattccgttacgaagacctggcttttattttgcactgttcgcgaagaagttattgcgatcggtacgccatttaccacactttttttatggttatgtgcgccataatacttcgacggaacagtaaaacgaagggaagaggcgatagtgtaattaattaaagcaagataatacccctgttggatcaaccttcgagtcgataaccggccataaagaagcgaaccgccatcccggaatgattctctttaaagaaatccatcaccatttctttatccagaccatagcgacgcgtcagaattccagcctcccacgcgctaagttgacgatcgccggtcttttcgaacatacggtgtgtaaaacccaatacaaagccacgtttatactcagaacagaaattcaccgcatgatgcgcgctatatgcatatggcgcgtgcaacccggccattaaccctttcccaaaatgattattcatctgacctccttagtcgctatataataaattatatagcgactaattaaatgaaggccagcgcattacgcgcttttttgcttcacatcagaaggaaacccattcatcagtagactgtgcgggagccgacgccattctctgaacgccaggcgccgctttcgccgttacgcgttgttgcggctcactagcggaaagccggaactgctgtacggagcgttgcaaatcctccgtctgccgttccagcgccgccgccgccgcggaaacctgctcaaccagcgcggcgttttgttgcgtaacgctatccatttgcgtgatcgccacgccaacctgagaaatacctttactctgttcttcggaggcggacgcgatctgtttcataatcgtcgtcacttccgtgacgccgcgcaggatggcgtccatcgtcgcgccggtctcctggaccaactgcgcgccctgcgctacgcgacgtaccgattcgccaattaaggcttcaatttctttcgccgcccccgcgctgcggctggccaggttacgtacctcaccggcgaccaccgcgaagccgcgtccctgctcgcccgctctggccgcttctaccgctgcgttcaaggccagaatattggtctggaaagcaatactattaatcacggtagtaatttcggcgatctgctgcgaactggcggaaataccgttcattgtttctaccacatcggaaaccagttcaccgccttttcctgccgttagcgaggcggcatccgcaagctgactcgcctggcgagcgtgttcggcgttcattttcaccgttgcggtaagctgttccatgctggcggcagtttcttccagcgcggcggcctgttcttccgttcgggaagagagatcgttattaccggtagaaatttccgtcgcgccgcgccagatattgtcgcttccggcgcggatcgtactcacggcttcgcgtaaactgtcctgcatcgcgcgtagtagcggcaccaaccggcctacgcagttacgccccaacgcttcaatcggctggctaagatcgccttgcgcgatgcgctgaaactgctgacggatgcgctccagcggtttcaccatcattgcaaccagatagcgatcggtaaaaatcaggatagcaatgcccagaatcaccgccgtgataagcaggatgcggatggtataggttttaccatcgaccatcacacgtgtgttatccagcatggcgccagcttcatgactaaaccgttccgcgctggcgccgaacgcgcgactgagtgcgggcgtgaccgtactggcatgttcgctccaggcggtcagcgatccttgctgcgccagttgcatttgaggaacgacgcctttctccagcaaggcctgccagttggacaagacctcccttgagatatcagggttcatcggccctggcgatagcgctttcatctcctccagcttctgacgcatattctcgagcgactgccgggcgggcgcaaaatcgggcgtgccgccgccgatttttacatccatcgcgcggctaaggcgggtaacaaagcggaaatattgatcgttaccctggcttagcaccgtcatttgccgcacaagatgccggtcaatatcatttccttccgaaacttcggataaagcatggacgctgtataaccccacccccgaccagagtagacaaaaaagtcccagtatcgtcagcatgaccatacgaatagtaaagttttgcagcaaacgcatatgaatttccttgctgaatataagagattagtcatcagacgatgacgcactctcgttatcggcaaggcgcggagaatatataatgcattctccatttttttacagttaccgccgtttacgtacccgcagatgttatatatctgtgaacgcagagaaaatctttcagtgttattactgagtaaatgaatagatgtagtaaaaatattgcgtaaggctgcagggagacggttatccaccgttaaagaagcgctgttttacagccgggctcagcatcctttgcccgactgccccgccgttgacggcggctcaatggttatgccgcgtcaatctgtccagatagcccatcacaaacgccgacaggacaaaggtcagatggatgatgacataccacattaatttgttatccgggacgtttttcgcgtccataaacacgcgtaacaggtgaatggaagagatagcgactatcgatgccgccaccttattttttagcgacgtcgcatccattttccccagccagttcagcttctccttgcccgcagagatatccagctgagagacaaaattctcatacccggagaacatgaccattaccagcaatccgccaaccagcgtcatatcaaccagcgataacagcaccaggatcagatcggcctccgccagggcaaaaacgttcggcagaacgtgtagaatttcctggaaaaattttagcgctaaagcgatcagcgccaaagagaggccaaaatacaccggcgcgagcagccagcgagacgcatacattacattttcaagaaagcgttccatagggacctgtcaggtaactaaaaccagcaacagtatatctcaaccatgcaacatcagatcaacatgccagttaagagcctatcccaccaggcgttattggcgcagccagtttggacacggacagcgcgcaaaaaccggagcgtacacgtagtacgtgaggtttgactcgctacgctcgcccttcgggccgccgctagcggcgttcaaaacgctaacgcgttttggcgagcactgcccaggtccaaaatggcaagtaaaatagccctaatgggataggctctaaatctcatccgggttaacctgcgggcgctgatattccggccataccagcgcgaccaatgccgggtaggcttcaagactgaactcgcgaaaacactggcgtaaattaaggacgtccaaatccgaatacggcaccttttctccgttcagacaacgcttctttatattgtcgtaatacttataaacggcagagttaaggtcgctgcaacgacgctgtgcgtcaaataatccaggcgtttcattcaactcagtcattgtcattcgttttatcgttgcatgaaggaaatcgatatattcatggttaacgcgccagtaccataccggcgttatcgaattcattaatactgagaaatgatcttcgccctcttcctttgtcatgggttcagtttgatttaaatttacgatttttccaccaggacgttttttattaacctcccacatcaggaagagtatcgcgccggtcagtaatagcaatataataacagaataaaaaatactgttcatagcaggctccattttttttgattttaaaattacgccatgttattgtcaacgaaacctacactattaaaaatagtataccactgatcgtaaaggatatttagtcatgcttcctgagcatctggtttcctctcattttcgcctgtcatcgccgccccctgaagccacagaaaacagtaaaaatttgcctaagggaaagacaaaactcagcgattacgagcccgatattttaattagcgctaacgctgccgggcaacacagaaacgtattatttgaagaacgcgaccgtcatattaaagaacgtctgtattgtgtggctaaaattgaaacgtttgcccgcctgataaacgcactacaggcagaaggcgatattgatgcccaaacgctaagtaaaatactggcggataaaaccgcaatgataaatgaaaaaggcaatgccatttggcttaatttaatcactcgcgaaaccgatatgccgctattttattcactggaagataaagatgaaagaagttgaagacaataacgtttatttggctttagacaaccataaaagtgatgaatttatcttaaagcaaaatcttgcagcgctaatcgccagcaaaaatgccaccctggaaaaggtaacgcaggaggtggtatccataccggcggcgttagtacgcctgaagtggcaaaaccgacgggagatgtatgcgttacaggtcaaagaggagatttatggcgcgaccatcaatgccattatcgagcagcatcctgaattacgagacaaaattatgtctcgtcttgaaagtgactggcagcatctgctggctcgcgagacggcaaccttacgtctgacgcgtaagctttccgatggcgactaccggacgcgcaacgtcaccaccgtcgcacggcaagaaaaataaccttcatggctagttaactctgttgtgaatacgggcgaagcataaggatcgttctgattctccctcttacggtagtaaaagtgtctacgcttaaagggtgttcaacctgaagggagaagctcaatgtctcatctatacgaccctaccacgcagtattacaccggcgagtatcctaagcaaaaacagccggcgcccggcgtccaggcgaaaatgacgcctgttcctgactgtggtgaaaaaagttatgtcggcagtggtcgccttaaagatcgtaaggcgctggtgacagggggcgactccgggattgggcgcgctgccgctatcgcttacgcgcgtgaaggcgcagatgtcgcgatcaactatctgccagcggaagaagaggacgcccagcaggttaaagcgctgattgaggagtgcggccgtaaagcggtgttattgccaggcgatcttagcgacgaatctttcgcccgttcgctggtccataaggcgcgtgaagcgctgggcgggctggacattctggcgctggtggccggtaaacagacggcaatcccggagataaaagatctgaccagcgagcaatttcagcaaaccttcgccgttaacgtttttgctctgttctggataacccaggaagcgattccgctgctgccaaaaggcgccagtattatcacaacgtcgtctatccaggcgtatcagcccagtccgcacctgctggattatgcggcaaccaaggcggcaatcctcaattacagccgtggcctggcgaaacaggtggcggaaaaaggaattcgtgtgaatattgtcgcgcctggccctatctggacagcgctgcaaatttccggcggtcaaacccaggataaaattccgcagtttggtcagcagacgccaatgaagcgggccggccaaccggcagagctggcgccggtgtatgtctatctggcaagccaggaatccagttacgttaccgcagaagtgcacggcgtgtgcggcggggagcatttaggctaacgcatgaagtcgattaaggtggcgcaattctgttaagcaaggcgccactttaggcaataaaaaagccgggtggcgacttcgccttacccggcctacagcgtcagcagaatacttatttcgctttcgcggtctcttcgccgaccagaccaatcttgagatagcccgcctgatgcagcatatccatcactttcatcagggtttcatactctacggttttatccgcgcggaagaaaatcgtagtatcctttttcccttccgtcagggccgttagctcggcaatcatcgtatcatccgtcaccggatcgttaccgataaacatggtgttatccgctttcaccgacagataaaccggtttttccggacgcggctgtggcgtactggtagaagcgggcagattcaccttgacgtccaccgtcgccagcggcgcagccaccataaagataatcagcagaaccaacatgacatcgataaacggcgtcacgttgatttcatgcatttcgccgttgtcatccaggttctcgttaagacgcattgccatgacgcattaccctacccgtaatttctgcgcggcgcgtaccggctgcgcactggcgctcgcattcagatcaagatcgcggctttgcagcagcaatacctgcgccgccacgtcgcccagcgtcgctttgtaactgcctatctgacgtgcgaagatgttgtaaatgacgaccgccgggatcgcggctaccagcccaatcgccgtcgccagcagcgcttccgcaataccaggagcgaccaccgccaggttggtggtctgcgtttgcgcaataccgatgaagctattcataatgccccatacggtgccaaacaacccgacgaagggggaaatggcgccgatcgtcgccagataaccgttgcctcgtcccatgtagcggcccaccgctgcgacgcgacgttccagacggaagccggtacgttctttaatcccttcgttatcttcgctgccctgagagagttccagttcattctgcgcttcattgatgagctgtgcgctgaggctttttgcgctgaaacctgccgcaatgtcggaagcctgatctaaagagcgcgcatcggctaattgcagttgttcgcgctttaagcggcgcttttgcgtgaaaaattcaacgcttttactgaagaagatagcccaggtgacgactgacgccagaatcaaaccaatcatcacgcacttcacgacaatatcggcgtgctgatacatgccccagacggaaagatccgtctgcatcaaattattacccactctgtatctccaggacgcaaatcacaaaatctgagcataataatatcaaaacaacgtcgaattgatagtcgttctcattactatttacatactgccgcacctttactgctttttctttgcgcttacgcattaaaaaagccacctgtttttattttggcaaaattttcatctgtatcacacgtcgccagggtgcagatggttatattcatgctagtttagacatccagacggttaaaatcaggaaacgcaacatgacggataaacagttggataccaaactggtaaacgcaggacgcagcaaaaaatacacgcttggctcagtgaatagtgtgattcaacgcgcttcttcactggtgtttgacaccgtcgaggccaaaaaacacgctacccgcaatctcgccaacggcgaattattttacggacgccggggaacgctgacccacttttcgctccaggaagccatgtgtgaactggaaggcggcgccggatgcgcgctcttcccgtgcggcgcggcggcggtcgccaacaccattctggcattcgttgagcagggcgaccacatcctgatgaccaacacagcttatgaacccagccaggatttctgcagcaaaattctcggcaaactgggcgtgacgacaagctggttcgacccgctcatcggcgctgatatcacgcaacatattcagccgaacacgaaagtcgtatttctggaatcccccggttctattaccatggaagtacatgatattccgagcattgttagtgcggtcagacgcgtcgcgccagaagccgtcatcatgattgataatacctgggcggctggcgttctgttcaaagctctggaattcgatattgatatctctatccaggcgggcactaagtatctgattggtcattctgatgcgatggtcgggactgccgttgcaaatgcgcgctgctgggaacaattgcgggaaaacgcctatctgatggggcaaatgctcgacgccgacacggcttatatgaccagccgcggtctgcgcacactcggtgtccgactgcgccagcatcaagaaagcagcctcaaaatcgccgcatggctggcgaaccatcctcaggtcgcgcgcgttaatcatccggccctgccgggtagcaaaggtcatgcgttctggaaacgagactttacaggtagcagcggcctgttctcctttgtgctcaataaaaagctgaccgaggcagaattatcagcctatctggataacttttcgctgttcagtatggcctactcctggggaggctacgaatcgctgattattgctaatcagccggaacagatcgccgcgattcgtcccgcaggcggcgtagattttaccggtacgctggttcgggtgcatattggtttagagagtgttgatgatttgatcgctgatttagccgccggcttcgccagaattgtgtaaagttgccggggatggacatatatgcagacaatttccgtggaaaagtctgcgtttgttgcgtccgggatcaaggcatcccggacgattcaggagtacaataggcgaataaaagcataaatgctgttccacaggaaagttcatggctgtcattcaagatattatcgctgcgctctggcaacatgattttgccgcgctggcgaatccacacgttgttagcgtcgtctactttgtcatgttcgccacgctatttttagaaaacggtctgctgccagcgtcattcttacctggcgatagtctgctgctactggcaggcgcgttgatcgcccaggatgtgatgcattttttgccgacgattggcattctcaccgccgcggccagtctcggctgctggctaagttatatccagggacgctggctcggtaatacgcgtaccgtcaaaggctggctggcgcagcttccggcaaaatatcatcagcgcgccacctgcatgtttgaccgtcacggtttgttagcattgcttgccgggcgctttctggcgtttgtccgcactctgctgccaacaatggcgggcatttccggcctgtccaaccgccggtttcagttttttaactggttaagcggcctgctgtgggtgactgtcgtgaccagcttcggctacgcgctcagtatgatcccgtttgttaagcgccatgaagaccaggtaatgacatttttaatgatccttcccgtcgcgctactggtcgccgggctgttaggtacgctggtcgtggtgattaaaaagaaatactgtaacgcctgacgtatccataatcggccaggatggcccggttacgcttcgttgacccgtggcgggatgccccacttagctcccttgcattgtccgcattcttgccacatcttcgcccggcgtaacgccaaaataacgtttaaactcccggctaaactgcgatgcgctctcatagccgacccgcatcgccgcggcgctggccttcataccgtcgtgaatcatcatcatccgcgctttatgcagtcggtagctttttaaatactgcaacggcgaggtgctggtgaccgccttaaaattatggtgaaacgccgacacgctcatgttcgcttctgccgccagttgctcaacattcaggttctcggtgtatttcatttcgatctgtttaagtacgcgactgatcaggctaaagtgcgtctggcgactaaccagcgcaagcagcgccccgccgcgcggccccatcagcacatgataaagaatttcgcgaataatctgttttcccagaatccgcgcatccagcgggcgctccatcacatccagcaatctttccaccgcacataaaatctcgtccgacagcgtggcggagttaatcccactggccgccatcggcaactggaaacgctcatcttcgccaatgtccatgagcaactcttgcagttgcagcacatcaatatcgagccgaataccggccagcggtacctccggcgtcgcccaggtctcgcattcaaaagggagcggcacggtcagtaagagatattcattagcgtcataacgaaacttgcgcttgttaatatagccaattttatggccggaaaagagaaatatgatgccaggctgatacatgaccggcgtgcgcggccccggttcaacaccatacaacagacgaatgcccgccagccgctcgctgattattttatcattattttttaaatgattaattttatccgccaactgtaagcaaattgcttcacgattcataacgcgccattttttcatcaaatccactccgctggattgtgcgcatttttagcgattttctccagcattctggagaaataggcaaaacattggcagaaatgtgcattgagagacatccctcacaagaccacaatgatgaccatcaggcagacagccgcctgccctctttttacccacataagggaatgagcaatgaacaatttcaaattacatacccctacccgcattctgtttggtaaaggcgctatcgtcgatcttcgcgatcaaatcccgcaggacgcccgcgtgctgattacctatggcggcggtagcgtgaaaaagaccggcgtactggcgcaagttcaggaagcgttaaaaggactggatgttcgggagtttggcggtattgaaccgaacccgtcctatgaaacgctgatgaaggccgtgcagcttgtgcgcgacgaaaatattaccttcctgctggccgttggcggcggttccgtactggacggcaccaaatttatcgccgcagcggcgcagtatacggacggcgtcgatccgtggcacattctggaaaccggcggtactgagattcgtagcgcaatcccgatggggtctgtgctgaccctaccggcaaccggctcagaatcgaacgccggcgcagtcatttcccgtaaaaccactggcgacaaacaggccttccactcctcgttcgtgcaaccggtgtttgccgtactggacccggtctacacctatacattgccgccgcgccaggttgcgaacggcgtcgtggatgctttcgtccataccgttgagcagtacgtcacttacccggttaacggcaaaattcaggatcgtttcgccgaaggtattttactcacactgatcgaagaaggtcccaaagcgctgcaagagcctgaaaactatgacgtccgcgctaacgtgatgtgggccgctactcaggcgttaaatggcctgattggcgctggggttccgcaggactgggcgacgcatatgctgggccacgagcttaccgcgatgcacggtctcgatcatgcccagacgctggctatcgttctgcctgcgctatggaacgaaaaacgagacgttaaacgtgcaaaactcctgcaatatgctgaacgtgtatggaatatcaccgacggttccgacgacgagcgtattgatgccgccattgccgccacccgccgtttcttcgaacagatgggcgtgcctacccacctgtccgattacggtctggatggcagcactattccggcgctactggctaaacttgaggcgcatggatgcataaatttaggtgaaaatcaggatattacgctggatgtcagccgtcggatttatgaagcggcgcgctaaggttttttcgcctctgactttcgtttttggccatttcgtccagacttaagtcacttagtctcgccggacccgactccggcgagccaattaaaagaggaacacatcatggctaatccaaccattatcaggctacaggatggcaacgtaatgccacaacttgggctgggagtctggaaagcaagcaatgaagaggtgatcgcggcgattcataaagcgctggaggtgggctatcgatcgattgataccgccacagcatatcagaatgaagaaggcgtcggcaaagcgctaaaagcagcgagcgtagcgcgggaagagctgtttatcaccaccaagttgtggaatgacgatcaaaaacgtccccgcgaagccctgcaggagagtctgaaaaaactgcagcttgattatctcgatctctatctgatgcactggcctgtaccggctatcgatcactatgtcgacgcctggaagggcatgatcgcgctgcaaaaagaggggctggtaaagagtatcggggtctgtaactttcagatccatcacctccagcgtctgatcgatgaaaccggcgttacccctgtgatcaaccagatcgagcttcaccccttgatgcaacagcgccagctacatgcgtggaatgcgacgcataaaatccagaccgagtcctggagcccgctggcgcagggtggcgaaggcgtattcgatcagaaagtgattcgcgaactggcggataaatacggcaaaacgcccgcccagattgttattcgctggcatctggactgcgggctggtcgtcattccgaaatccgtcaccccttcccgtatcgcggaaaactttgctgtctgggatttccgtctcgataaagatgaattaggcgagatcgcaaaactggatcaaggaaaacgcctcggtcccgatccggatcagttcggcggttaagccggatttatcgcacgccatgcccgacgatgtcgtcgggcttttttgcattccgaaacattaagaaacaattacgcgcatttaacagtatatttcccccacacacaagcgcagaattattctgattttgtgaataattattcatatttattatgaatttacttaatgcatataaaatatttatggatgtgtgattgtggcggaaaaaaaatctcagggcgtcaaatggctcccattcattcttattctggttatcgccgccggactgtggcagctaacgcccccttccgggttaagcgcgccggcctggcattccgcgattatttttgtcgcgacgatcgcctctatcgtggcgaaagtgctgcctattggcgcggtcggtattattggtatcaccgtctttgcgctcgcctatgctgccggcgacaaaacggccagcggcgcgattaccacggccttgagcgagctgaacagttcgctgatctggcttatcgtcgtcgcctttatgattgcccgtgggtttatcaaaaccgggctgggtcggcgtatcgccctacaaatgatccgtctgttaggtaaacgaacgctgggtctggcttatggtctggcgtttgccgatctgatcctctctcccgcgatgcccagtaacaccgcgcgctgcggcggcgtgatttacccgatcgccgactcgctggcgcgcagctttgattcacatccggaagatgagtctcgcagcaaaatcggcacctttctgatcacctgtattggcaatgttaacgacgtcactgccgcactgtttatgaccggttatacgggtaacctgctggcggtaaaactggcggcgaacgccggcgttacgttgagctggggaagctggtttatcgccgcgctcctgccttgcctggtctcttttcttatcgtcccgctgctggtctactgcctgacccgtccggaaattaaacatacgccggatgcgccggatttggcgcgcaaagagctggcgcaaatgggcagtatgacgcgcggcgagtggctcatgctggcgaccgtcggcgtgttgctggtgctatggatttttggcagctcgctcggcgtggatgccacgacggcctcttttgtcggtctctctattttattactgagcggcgtgctcacctgggaagacgttaaaagcgaaaaaggcgcctgggatacgttgatttggtttgccgcgctgctgatgatggctaaccagttgaagaaactaggattcaccagctggtttggcaacctgattggcgacagcatcggcagcacgatgcatggaaccagttggataatcatcctgctgctgcttaacgcagcctatttttatacccactatttttttgccagcggcaacgcgcaaatcgccgcgctgtatgcggtatttctgggcgtcggtctgcatctgaatataccggcggcgccgatggcgctcatgctggcgtttaccagcagcctgtactgctctcttacgcagtatacccacgcacgcggccccattctttttggcgccggctatgtaccgacgggcgtctggtggcgaacgggatttattatcagtctctttaatcaggcggtctttttgacagtcggcctcgcatggtggaaagtgttagggttgtattaaacgcttaacgcatcgataagcccctcggttaacggagaaatggaatgacctgcattttctgtcaaatagttgaaggtaaagcaccttgtcataaagtttgggaagatgagcatcacctggcttttttgtcgatttttccgaataccgatgggtttaccgtagtgatcccgaaaaaacattaccccagctacgcgttcgatctaccgccgcaggcgttagcggacctgatgctggcgacccaaaaagtggcgaagaaactggataaggctttcccggatgtcagtcgtacgggaatgttcttcgaaggtttcggcgtagaccatgtgcacagtaaattaagccccatgcacggtactggcgatttaacccactggaaaccgattgaatcgcggcagaataaatttttcgaacagtatgaaggatatctgtcgtcacacgatcatgaacgggctgatgatgaaaaactggccgcgctggcggccagaattcgtgaggcataaatacggagcacttctgccggatggcggtgtaagcaccttatccggcctacaaaactgtgctattcatagacctgataagcgcagcgccgtcaggcattataccttagattatatacttcttatctattttaatatatcaaccctggtaggttaaatattacggcgcgtggctaaatatttcgtacaaaaaccatccaggaatagcggcaataacacccattaaaattatccctgcaagagtcatttgcctgtcttcacgtttttccatattacatgctttaatagccattatgaatataacaacagctattatagcaattacgataaaacagggaataataatcatacccatgatatcccctcctctggggctgtatacaagcatcatgccttaatcattaaggtaatatataattaatttatacaatcaataatatttaaataaaatataaagctccccgtaatttagcaattactaaagatcgacacaatatatttagatgtctgttacttccagaaacattagcttccagaagcaacagattcaaaggtaattaacgccctgcgcctttcccgcgcttcttattcgcagcaagcccctgccgctgatgttccaccggcgtatgcttggtcaacgccgggcgcgtgttgcggttctggcgacgcgcttcgcgcatctcttcaatggtcggcgcaggcaccagacactcacggcgaccgccaatcaaatgctttttccccatcgcttccagcgcctggcgaatcagcggccagttcgccggatcgtgataacgcagcagcgccttatgcaggcgacgctgcctgtctcccttcggcaccaccacatcttcactcttataaccaattttacccagcgggtttttgccggtgtaatacatggtggtcgaatttgccaacggcgacgggtagaagttctgcacctgatccagacggaagcggtggcgcttgagccacagcgccagattcaccatatcctcgtcccgcgtgcccggatgcgcggagataaaatatgggatcagatactgctcttttccggcctgtttagagtaaaggtcaaataactctttaaagcgatcgtagctgcccatacccggcttcatcattttcgacagcggaccttcttcagtatgctccggcgcaatcttcagatagccgcccacatgatggctcgccagctctttaatgtagcgaggatcttctacggcgatgtcgtagcgcacgccggaggcaattaagattttcttaatgcctttcagctcacgggcgcggcgataaagattgatcgtcggcgtatggtcagtatccatatgcggacagatatccggatagacgcatgacaggcgacgacaggtctgctccgcacgcggcgacttacagcgcagcatatacatgttcgcggtaggaccgcccagatcggagatcacgccggtaaaccccggcaccgtgtcgcggatcgcttcgatctcgttgatgatagagtcttctgaacggctctgaatgatgcgcccttcatgttcagtgatcgagcagaaagagcagccgccaaagcagccgcgcatgatattgatcgaaaagcggatcatctcataggccggaatacgggcattgccgtaagccgggtgcggcacacgctgatacggcagcgcaaacacgctatccatctcttcagtggagagcggtatggcgggcgggttgatccagacatagcggtcgccgtgtttttgcatcagcgcccgcgcgcagccagggttagtttcgtgatgcagaatacgcgacgcatgggcgtacagcaccttgtcgcctttcaccttttcaaaggatggcagcaggatataggttttttcccacggcttcggacgcggcggctgcacggtaatcgctttagcttcctgctttttcggcgcgaccggcttgttatccgcgcacggcagatcctcgccatagggatggggaattggatcgattttacccggcgtgtccagacgagtggagtcgacgccgctccagcctggcagcgcttctttaaccataatcgcagtgttacgcacatcacgaatctgatcgatggtttcgcccattgccagacgatgcgccacttccaccagcggacgctcgccgttgccaaacatcagcatgtcggctttggaatcgactaacactgaacgacgcacagtatcagaccagtagtcgtaatgcgcggtacggcgcagactggcctcaatgccgccaaggatcaccgggacatctttccacgcttctttgcaacgctgggtatagaccagcgtggcgcggtccgggcgtttgcccgcgacgttatccggggtgtaggcgtcatcgtggcgcagcttacggtcagcggtgtaacggttaatcatcgagtccatgttgccggcggtgacgccgaagaacaggttcggttttcccagacgcataaagtcgtctttgctgttccagtccggctgggcgatgatccccacgcggaagccctgcgcttccagcatacgaccgcaaatcgccatgccgaagctcggatggtcgacgtaggcgtcgccggttaccagaataatgtcgcagctatcccagccaagttgatccatctcgtcacgtgacatcggcaaaaacggcgccggcccaaagcaggcggcccagtactgcggccaggagaaaaggtcgcgatccggttggatcagggagatagcgctcataatgcttccaaaacgattggcaaaaaaataatcaaaggtcggggattataagccgtatctatagcgaaaatgaaggagattatcgccttatatgcaggactggcgcgaaatagaaacaactttcaacggcctggcctgaggtgtttgaaattggtcttatgaatatcttcaaattggtatgcaattaattatacccacgtctaaaaacgcagtatcgtcataacaacaaaaagtaaaaaaacatcacattatcagtaatatataaaaaaacttcgctgaattgctcacgacactgtttttaccatgactttcttctgtgaaccagatctctttctttggtctattgattaaattaaattggctgacagaattcaggggataaagaacaccatcaccacgcctttccccaacgcaacaccttacgtatcagcaggttattaattaatcaacgataaccacaggaatcccaacctataaggaagcagatatgaaaaacacacgttcattcacaacatcagcggtattactggccggctgtttgctactggcatttccagcgctcgccaaaaccacgctgaaactgagccacaatcaggataaaagccacgccgttcacaaagcgatgagctatctggccgacaaagcgaaagcctattcggacggcgaattaaatattcgtatttaccccaacgccacgctgggcaacgaacgtgaatcgctggaattgatgaactccggcgctctgcaaatggtgaaagtcaatgcggcatcgctggagtcttttgcgccggaatatagcgtgtttagcctgccgtttttattccgcgaccgcgatcactactacaacgtactgaaaagcgacttagggaaacgcattctcgcgtcctccgaaagcaaaggcttcgtcggcttaacctggtacgacggcggcgcccgcagtttttacgctggtaagcccatcactcaacccgacgatttagccggtatgaaaatcagagtgcagcaaagccccagcgctatcgcgatggtgaaagctctcggcggcgtgccgacgccgatggcgcaaggcgaactctataccgcgctccagcaaggcgtggtcgatggcggcgaaaacaaccccgtggtttatgccgatatgcgtcatgcggaggtggcgaaattctattcccgcgacgagcacacgatggtgccggatgtcctggtcatcagtaccaaagtacttaacaaattgagcgataaagagcggaaggcgttatataaagccgcagatgaatccatgcagcaaatgaaagatgtcatctggcccgccgcggaaaaagaggcttatgagagcatgaaggccatgaacgcgactgttgttgatattgataaatccgcgttcaaacagcgtgttaagcccttgtttgatgagttccgcgcaaaagacgctcagtcagcgaaggatctggaatacatcgagaatatgtaaatctgccgggcagggttctcctgccctttacaggatgtaatatgcgaatactcaccaatgcactgaacaaaatactggccgggtgctgctgtattattctggcggtcatggttgcctgcgtatcctggcaggtggcggcgcgctttatattcaacgcgccaagcagcacgctcgacgaattcacccagattctttttatgtggatgattctgctaggcggcgtctataccgccggattaaaaaaacatttagctatcgatttgttagcgcaaaaactctcccgaacgcccgccctcatgctcgacagtatcattcaggtgattattaccgtgttcgcgctgatttttatggtgtacggcggtgatattattgttgaaaaagcggcgcacgtcagccaaatgtccccggtattaaaatggcctatggataaagtctattgggtcatgccgattagcggcgtcatcctggtgtactacaccattgtgaacgttattgataattatcatcagcgccatcttcgctaacgagggatatatggactttgaatatatttacccaataattgttttatttggcagctttgccattatgctggcggtcggcgttcctattacattcgctatcgggctgtcgtccttattctcaatcctgatagcccttcccccggatgcggcaatctcggttatttcgcaaaaaatgaccgtcggtctcgatggctttacgctgctggcgatccccttttttgtgttagccggcaatatcatgaataccgggggaatcgcccggcgcctggtgaatctggctcaggcgttagttggccgccttcccggttcgctggcgcactgcaatattctggcgaacaccctgtttggcgcgatatccggctcggcggtcgcttctgcggccgcggtgggcggcatcatgtcgccattacaggaaaaagagggctactctccggcgttctctacggcgatcaacgtcgcttcggcgccgattggcctgatgatcccgcccagcaatgtgctaattgtctattcgctggctagcggcggcacctctgtcgccgccctgtttttggcgggctacctgcccggcatcttaaccgcgctggctttaatgacggtagcggcgctgtatgcccatcgccaccattacccggttgccgaacgcatcaacctgcggcagtttctgtcggtattccgcgattcgttgcccagcctgttgctgatatttattattatcggcggcattatcggcggcgtatttacgccaacagaggcctctgcgatcgcggtaatctatagcctggcgctggcggccatttatcgagaaattaatgtgagtaagttgcgcgatattctgctggattcggtagtaaccagctctattgttctcttactggtcggctgctcaatgggaatgtcatgggcgatgaccaatgctgatgttcctgaactgattaatgaaatgattaccagcgtgtccgaaaataaatgggtcatcttgctgattatcaatctcattttgttattcgtcgggacgtttatggatattaccccggctattctaatctttacgcctattttccttcccattgctcaacatctgggaatcgaccctgtccattttggcattattatggttttcaatttaaccatcggactgtgtacgcccccggtaggcactattttgttcgtcggttgcagtatcggcaaaatcagtattgataaagtcgtcaaaccgctattaccgatgtttctggcactctttgtggtcatggcgatgatttgctacttcccgcagttgagtctgctgcttcccacgctgtttgctccttcctgaaaaccctgacgggtctgcgctattcagacccgtactcggacgctttacgacgctggattcaccagcatttgcccaatcgagccgcggtcagccatttccagcgtctggctgttgaaatagaacgggaagtgcggccaggacggctgaccgtaatagaccagcagttcgacttgcccatccacccagacggtatctttccagcctctatcttccgggaacggcatagcgccgttgacgttacgaatcaggaaagagacgccctcaatatggaacgactgcggcatatcggcgcgtaccgtccagcgctcccaggtgccttgttgggcggtaatatcaatgcgattcacatcccacagttggccgttaatccccggatcgtcgccaagactgatgtcccgactgcggacaggcgcgccgctcatgatctccgtcggcaacagacgcatcggcagattatcggtcaccagcggcagcaatccggttggccgtaacgtcagcaccagggtcgaaaccagaatactggaaggctcaaagaaaccgcgaatccgatcgactatgctggccgcttccccgcaggtgatcgagacttcgtcgccgttggtcatatcaaccaggatttcacgtcgctcgccgggcgccagtgacaactgtttgacggaaaccggcgcaggtaaaaagccctgatcgcctgaaatcacatgcagcgcccggccatcgctcatctgaagctgatagcgccgcgagttcgaggcgttcaacaaccgtaaccgcacccagccgcgggacacttcgacataggggctttgcgcgccgttcaccagcagcgtatcgccgacaaaaccaccgcttcccggttcgctgtactccggcgtcccaaagttatccagccgtttatcctggataatgacgggaaaatcatccacgccgtaatggttcggaatgggcagcgttttactgatgtcgtcttcgaccagccacattcctgccaggccgttatacacctgctgcgcggtgcggttaggcgtgttagcgtgataccacagcgtcgcggcgctctgacgaatcggcaacaccggcgcccagtccgcgttcggcgacatcatacgcgccgggccacccatcagcggccccggcaccagtaaaccagcaaccgtcatggagacattttccgccaggcggttgctatagatgagtttaacgtcatcgcctttccagacgcggattgtcggccccagataacgaccgttcactccccagaccggcgcgcgcgtgccttgcgtaaaggaccagtgcgctcgctgtagcgtcataaacaacggctgcccgcgacgggactccagcaacggcggaacaggcaacggctgttgctgaccggcagcattcgccctgaggggaatcgcgcctgcacatagtgcgattcccgatgcctgaagaaactgacgccgactgaatgacatataagctccatgtaaaacaggctaaagagttgtgcctgaaaaaatgatttctacaataacagagtaaggctgcttaaaccttaccggtcgcttcacgttccgcaacctctttatcaagttccgcgattttttgctccattaacgcacggcagtgggccgccagctcgcgaacctgatctttaccatattcgctgacgtcgactggcggcagcatttccacaataaccagtccgttgttcaggcggtttagattgactttgttagaggtgttggaaacgcagacaggaatgatcggcacaccagccgcgatagccgcatgaaacgcgccggttttaaacggcagcagaccgcgtccccggctacgcgtaccttcagggaacatccagatagaaatacgacgctttttaaaatggttaaccactgccgcaatggtgctatgcgctttggcgcggttattacggtcaatcaacagattaccggtcagccagtacagttgcccaaaaaacgggatccaaagcaggctttttttccccaccgtcaccgttggcggctgcacaatattcgccgccgtgaccatatcataattattctgatggttagcaatatagatagcattgccatagttttccgcgtcggcgggtttgcggcactccactttcaggccaaacagcggggccagacggccgaacatatgtccaaacgtcgccacgtgttttgggttacgtgggctgaaaaggcagtaaatagaaccgaaaacacagaccagaatggagtaaataacggtaacaataagacgaaaaatatatagcataacaacctctgaaggcctaagagcccggcattctacgtcacctgaaattcaggttaggattttggtaagtgtggctctctggaaaaacgtattgttaatcgcaatgcacgaataaacaacggttttacgggaaattttaatgttaatccgatctgaaaccgtaggccggataagacgctactgcgtcgtcatccggcaacggcagagcgccggatggcggcttagatgccttgtccggcctacgggcgcccctgtcttactcttcgctgtcgccatgacttacgcgatgcggcgaatcaatctcaatgcgatcgatacgctgcaggccgcgcattaatgtgccacggcgtccgcgttcaccgaccaccttttgtaactcttcagggcgcagtttgattttgcgcttcccgacatggatagtcagagtgctttgtggcggcagcacgtacaggtgcgccagtccatcatcgcctttcgccgcttctgcagaggggatattaatgatcttattccctttgcctttcgacagctgcggcagagagtctaccgggaacatcaacatccgtccggcctgggtaatcgccagcagcatatcgtgctcgtcttcaatcaccagcggcggcatgacgtgcgcattttccggcagtgtaatcaatgtcttaccggcacggttacgggcaaccagatcgttaaacgtacaaacgaagccgtagcccgcatccgacgccatcagcagtttctggtcatcgccttccatcagcatatgctctacggtcgcccccggcggcagcgtgagtttgccggtcagcggctcgccctgcccacgcgccgacggaagcgtaatgggatcaatagcatagctgcgcccggtggtatcaataaacaccaccggttgattgctcttacctttcaccgcggctttaaagctgtcgcccgctttatagttaagccccggcgcatcaatatcatgacctttggcgctgcgcacccagcccatctgcgacagcacgatagtcaccggttcggacggcagcatatcgtgttcgctcatcgctttagcttcttcgcgctcacgcagcggagaacggcgatcgtcgccataggcatcggcgtccgcctgtagttcttttttcagcaaggtattcattttgcgttcggacgcgagaatgccctgcaactggtccctctctttttccagctcgtcctgctcgccgcgaattttcatctcttccagtttggcgagatggcgcagtttcagttcgagaatcgcttccgcctgggtttcgctgatgccgaaacgcgacatcagcgcgggttttggctcgtcttcgctacggataatctcaatcacttcgtcgatgttgagaaacgccaccagcaaaccttcgaggatatgcaggcgcttaagcactttctccagacgatagttcagacgacggcgcaccgtgtcgcggcggaacgccagccactcggtgaggatctccagcaggtttttcaccgccggacgaccatccagaccgatcatgttcaggttaatacggtagcttttttccagatcggtggtggcgaacagatggttcatcacctgttccatatccacacggttggagcgtggcacaatcactaaacgcgtcgggttttcgtgatccgattcatcgcgcagatcgtccaccatcggcagttttttattacgcatctgcgcagcaatctgctccagcactttcgcgccagagacctgatgcggcagcgcggaaattaccacagcgccgtcttctttggtccataccgcgcgcatacgcacggagccccgcccgttttcgtaaattttacgaatttccgcacgtggggtaatgatctccgcttcggtcgggtaatccggcccctgaacgatatccagcaactgatccagcgtcgttttcggctgctcaatcagcgtaatcgccgctttcgccacttcgcgcaggttgtgcggcgggatatctgttgccatgcccaccgcaataccggtggtgccgttcagcaggatgttcggcagacgcgccggtaacattttcggttcctgcatggtgccgtcgaagtttggcacccagtccgccgtcccctgaccgagttcgcttaacagcagctcggcgtatttggacaggcgggattcggtataacgcatcgccgcgaatgacttcggatcatccggcgcgccccagttcccctggccatcgaccagcgggtaacggtaagagaacggctgcgccatcagcaccatggcttcatagcaggcgctgtcgccatgcgggtgatacttacccagtacgtcaccaacggtacgggcggattttttaaatttagcggtggcgttcagccccagctctgacatcgcatagacgatgcggcgctgtaccggcttcaggccgtcgccaataaacggcaacgcacgatccatgatcacgtacatggagtagtttaagtaggcgttttccgtaaattcatgtagcgcaaggcgctctgccatatcgctcattaacaggggatcctcaatctgcatgctgaccgttcggacggcaatattgccgcagataataccctatctcacggtctgagtcacaaaccgtgagacaggtggcgaggaagttaacgaagcggcagatagatatccgtcagcagctcatgttccgcgacctcatggacgaaattcaggtactggaagaagaccggaaaatcgcgcggcgtctcaccgctggcgggtagccattcgcggaataaataccacacgctctccgggaggctgtcgagcgatccctgatggcgcaccaccgcgcagcgcccgccaggaatctcgctattcaccacgccaacgtcattttcggctatcggctggcggacgctgccgcagatatcaaagcggaattgagccggcggcgtcgtctgcgggtcgtgccaggcaataccaaaagtttgactgctggcaatcggcgactggcccgtttcgcgtcgccatgcaataaatttcgccgcgctggcgttgaccttatccggatgccccagatgcgtcagcatcgcgacgcgggtaggtggaaattcaacgatttttacgtccatgacatgctgctcctgtaacgcaagtttaggaacgcgctggtgccaggccagccagtccggcgattgccgaaaccggcgcgggctttgaccaaacgcggttttgaaagcacgtgtgaacgactccggattctgaaacccggcatccagcgcgatatcgataactttatcctgcgggttaaacgccagccgccatgacgcgcggcgcaaacgcaaccactggatatagcgatagagcggaagcccgctccaggtggtaaactgccggtgaaaatgaaacggcgagctgtgcgccatccggcttaacgcctcaatcgacagaggctcatccagatgacgctcaatgtggtcgcaaacgcgccgcagacgttcggaataagccgcgctgatcaggtcattcatcactgcctccttgtggcctattctgcccaccgggcggctgtgaatcctgaccgatcttgcgcaatgtgggattacggattcactttacgaatctgttttacgtcgatttcgacagagttccagtctttatccacttcgccctgaatttcaacggtatcctgcggggttacggtcaggccgttccagcgcttgtggtcaatgtccacattgatagtaccggtcgcatctttaaacacatacagatcgtcggaaatgcgctcgacgatattcccgcgcagcgttacccacgcatcgtcacgcagcgatttagcgctctctaccgtcgtgctgctgccgttcgggccgacaaatccgccgccttgcgtttgcgtcgccgacgggccggagaaaccgccctgctgagccgccagaaccggggtagaacacagtgccataacggcaacgattgcagctaattttttcatgattacttttccctttcatgtcgtttcagatccatttaataaggtaatccttaacaacttcttaaggcaaaaaaagaatctttttttctgtacatcgcctgcggcgacaaggttaactgacggcaacgcgagttaccgcaaggaagaacagatgcgaattttactggtagaagatgacacacttattggcgatggcataaaagcgggcctgagtaaaatgggtttcagcgtcgactggtttaccgagggacgtccgggcaaagaggcgctttacagcgcgccttatgatgcggttattttagatttgacgctgccaggcatggacggacgggatattttgcgcgaatggcgcgaaaagggtaaacaggaaccggtactgatcctgacggcgcgcgacgcgttagcagagcgcgtcgaggggctacgtctgggcgccgatgactatttatgtaaacctttcgcgctcattgaggtcgccgcccgtctggaggcgctggtacgccgcgccagcggtcaggccagtagcgaattgcgccacggccaggtgacgctcaatccaggcaatctcgtcgcgacgcttgccggcgaaccactggccctaaaaccaaaagagttcgcgttgctggaactcttactgcgcaacaaaggtcgcgtgctgccgcgcaagcttattgaagagaagctgtataactgggatgacgacgtgtccagcaatgcagtggaagtccatgttcatcatttacgccgcaagctcggcagcgaatttattcgcaccgtgcacggcatcggctacaccctgggtgacgcatgaaattgacgcaacgtctcagcctgcgcgtcaggctgacgcttattttcctgattctggtctccatcacctgggcaatctccagttttgtggcctggagaaagacgacggataatgtcgacgagctgtttgacacacagttgatgttgttcgccagacggcttagcaccctcgatcttaacgagatcaacgccccgcagcgcatggcgcatacgccaaagaaattaaaacatgggcatatcgatgacgatgcgctggcgttcgccatcttttccgctgacggcaaaatgttgctgcatgatggcgacaacggccaggatattccgtatcgctatcgccgggaaggtttcgacaatggctatctgaaggatgacaacgacctctggcgttttttgtggttgaactcggcggacggcaagtatcgtatcgtcgtcggtcaggagtgggattaccgcgaagatatggcgctggcgatcgtggcggcgcaattaacgccgtggctgatcgcccttcccttcatgctgctaattttattactcctgcttcaccgcgagctcagaccattgaaaaaactggcgcaggcgctacgcttccggtcgccggaatcggaaacgccgctcgacgccaaaggcgtaccgagcgaggttcgcccactggtcgaagcgcttaatcagctttttagccgcatccactccatgatggtgcgcgaacggcgatttacctccgacgccgcccatgaattgcgcagcccgctggccgcgctgaaagtacaaaccgaggtggcgcagctctcgggcgacgatccgctatcgcgtgataaagcgctgacccagctccatgcggggatcgatcgcgccacgcgactggtcgatcagctactgacgttatcgcgtctcgactcgctcaataatttgcaggatgtagcggagatttcgctggaagagctgctgcagtccgcggtaatggatatttatcatccggcgcagcaggcgaatatcgacgtgcgtttacagcttaacgcccatgacgtcatacgtaccggccagccgctactcttaagcctgttagtgcgtaacctgctggataatgcgatccgctacagtccgcagggcagcgtcgtcgacgttaccttacatgcccgcagcttcaccgtcagagataatggccccggcgtagcgccagagattctgacgcatatcggcgagcgtttttaccgcccgccaggccaaagtgtgaccggcagcggtctgggattatcaatcgtccgccgcatcgctacgctgcacggcatgacggtgtcgtttggcaacgccgcggaaggtggatttgaggccgtagtaagttggtaacagagacttttgccaaaaacgcaaaagactttgcacattttgctaatttcaccgcaccgcccgtcagcgtagaatcagcagcaaacgcatttcttgaggacacaaaatgagtaacatcctgattatcaacggggcgaaaaaattcgcgcactccaacggccagttgaatgacaccctgaccgaagttgccgatgggctgctgcgcgatctgggtcatcaggttaagatcgtccgcgccgacagcgactatgacattaaagaagaggtgcagaatttcgtctgggctgacgtggtgatttggcagatgccaggctggtggatgggcgcgccatggacagtaaaaaaatatatggatgatgtctttaccgaaggtcacggtacgctctatgccagcgatggccgcacgcgttccgatgccgctaaaaagtacggttccggcggtctggtgcaggggaaaaaatatatgctgtcactgacgtggaacgcgccgatggaagcatttaccgaaaaagatcagtttttccacggtgtaggcgtagatggcgtctatctgccattccataaagccaaccagttcctgggcatggacgcgctgccaacgtttattgccaacgacgtgattaaaatgccggatgttccgcgctataccgcagaatatcgcaagcatctgagcgaaatttttgcttaactggtcatcctggaattagaaggagttaaccatgcttaccgtcattgccgaaattcgcacgcgtccgggccaacatcaccgtcaggccgtcctcgaccagtttgcgaaaattattccaaccgttcttaaagaagaggggtgccacggttacgcgccgatggtggatcatgccgcgggcgtgagttttcagactctggcgcctgactcgatcgtgatgattgaacagtgggaaagcgttgcgcaccttgaggcacatctgcaaaccccgcatatgaaagcctacagcgacgcggtaaaagacgatgtgctggaaatgaatattcgtattctggaatccggcgtttaagttattaccctcgtctgacgtcgccctgatgcgatgcgcaagtgtcgccatcaggctgcggcgtcatgtcggattcgcttatccggcctgcggcatgcagaccagataaagcgtgcaacaaccgttacacgtcgagatccgcgagatcgcctttttcctgtagccagttgcgtcgatcttcagaacgtttcttcgccagcagcatatccatcatcgcattagtacgctgatcgtcttcatcgctaatggtgagctgcaccaggcggcgagtattcggatcaagcgtggtttcgcgtaactgcatcgggttcatttctcccaggcctttgaaacgctgtacgttcggcttgcctttcttacgcttcagttgttccagtacgcccgccttctcttcttccgtcagcgcgtaatagacctctttacccaaatcgatacggtatagcggcggtagcgcgacgtagacatgaccattcttcaccagcgcgcggaagtgtctgacaaacagcgcgcaaagcagagtagcgatatgcaaaccatcggagtccgcatccgccaggatacagatcttgccgtagcgcagctgactcagatcgtcgctgtccggatcgataccgatcgccacggaaatatcatgcacttcttgcgaggccagcacttcatcggaagagacctcccaggtgttaaggatcttacctttgagcggcatgatcgcctgatattcgcgatcgcgcgcctgcttggcggaaccgcccgccgaatccccttccacaaggaacagctcggtccgattaagatcctgcgcggtacagtccgccagtttccccggcaacgccgggccgctggtgagctttttgcgcaccactttttttgcggcgcgcagtcgccgctgcgcgctggcaatcgccatctctgccagttgttccgccgcctgcacgttctggttcagccacaggctgaaggcatctttcaccacgccggaaacaaatgccgcacattgacgcgacgacagacgctctttggtctgcccggcaaattgcgggtcctgcattttcacggaaagcacataagcgcagcgatcccagatatcttccgccgacagtttgacgccgcgcggcagaatattgcggtattcgcaaaattcgcgcatcgcgtcgagcaggccctggcgcagaccgttgacgtgcgtccccccctgcatggtcgggatcaggttgacgtagctttccgtcagtaattcgccgccttccggcagccacaatagcgcccagtcaaccgcttccgtttcaccgttaaaattaccgataaacggcttttccggcagcgtcggcaggccgtttaccgcttcgcccagatagtcgttcagaccatcctggtagcaccagcgctgctcgctgttattcacttcatctttaaaagtgatttccacgccgggacacagcaccgcttttgctttcagaacgtgcattaagcgagagacagaaaaacgcgggctgtcgaagaaactttcgtccggccagaaatggacgctggttccagtattacgtttaccgcaggtgccgacaacctgcaaatcctgcactttttcgccgttttcaaacgcgatgttatagacctgaccgtcgcggcgcacggtcacttccacgcgctttgacagggcatttactaccgaaatccccaccccatgcagaccaccagagaactgatagttcttattggagaatttaccgccggcatgaagccgacagaggatcagttctaccgccggaaccccctcttccggatggatatccaccggcatcccgcgtccgtcgtcaatcacttccagcgattgatcggcatgtaaaatgacatccacgcgtttggcgtgacctgccagtgcttcatccacactattatcaatcacttcctgacccaaatggttggggcgggtcgtatcggtgtacatccccgggcggcggcgtaccggctcaagcccagtgagtacctcaatggcatcagcgttataagtttgcgtcatggtttaattagcaattcgaattgattgtcagcaactgtgcagtccaagaaaatcgacaatctggttgaaataatcttcgaagcccgtgaatgcgtgattaccaccctcggtcactgtctgacggcaggaggcgtaatatgccaccgcctggcggtaatccagcacttcatcgcccgtctgttgcagtagccagatcaggtccggcgcttccagcgggtcaatctgcatgactttaagatcataaatatggcgagactctagcacatattgctgcccggtgtaggggttctcgttctgaccgagatagtcggtcagtaattcaaagggccgcacggcgggattcaccaccacagccggcagcataaaacattgcgacagccaggtggcgtaataaccacccagcgacgatcctaccagccctaatggcgcaccgccatgctcaagcacgagagattccagcaactccgccgcatcggcaggatacggcggcagctgagggacgatcatctcaacatgcggatgacgctccgccagccagttttttagctggcacgcttttgccgagcgaggggaactgttgaatccgtgcaaatagagaagcgtagacatcagtatccttccgaagcggtatcgggtcggaaccgggtatcctgcaggcgatgcacttccgtctccaggacgccgttcgcccggagctccagcgtacgccagcccggcgcgatagtatccagcgtaaagttcgcgcagtgcggtttgaactgtacgcaggttgacggcgacgccagcagacggcgaccgttccagtcaagatccagctcctggtgaatatgtccgcataacagatattttacacgcgggaaattcgccagcacgctatccagctcaccggcattacgcaagctgtgctgatccaaccaactgcaccctgccggcaacggatggtggtgcaacaggagcaatgtctgtctctctggcgcatcggcgagcttacgctcaagccattccagttggaactcgctcagttcgccatgcggaacgccaaacacctggctatccagcaacaaaatctgccattgttcaccgattaacacgcgtttagccggggaaatccccgcctcttgcagcgcgctgtacattgccggctgaaaatcatgattgcccggtagccaaacgcaaggcgcgcgaaagcttgcgataccctcagcaaaatgctgataagccgcagcggattgatcctgcgccagatcgccggtggccacgatcagatcatattcatactgttgcgcccgaatagcctccagcacggcctggtaactttcccaggtattgacgcctaacagcgtttcatgcttttcggcaaacaggtgagtatctgtaatttgtaaaatcctgactcgggcctcaccagccagaggtagggttaacaggctttccaaatggtgtccttaggtttcacgacgctaataaaccggaatcgccatcgctccatgtgctaaacagaatcgtagccagtcggccagaaactgattaatttgatgcttttcgtcgcgttgatgcaactttttatttggataatcataccgcgctttgaagcgaaagatctgctggcttgaacacacttcagccaccatcgcatcatggtagaggcgcaccgtcagcgacggcaggctccagtaggtgatggctggcgtcgtttgctcgatcgttacaagcgtagtgtatcgggtcgattccacaatcgttaaccgatattgtacgttgcccacctgatagctcaccgtttcaccgggggcgtcattgcgcggcagcaggcggcgcaattgcgaaaaattggtttcgcacaaacgcatcatttctgggaagtcaggtgtataacgcttcattttttccactcgttttttaactcttgatgatgcaactgaagccattgcaaagcgatgactgcggctgcgttgtcgattttcccctcttctacccactggtatgcctgttcccggcttaccacatgaacccgaatatcttcgttttcatccgccagaccatgaatacctaccgcggtcgtggcgtccacttcacccaccagaatagatgagcgctcgctggttcctcctggactcgccaggtaactgatgaccggtcgggtgcggcccacggtcagccctgcttcttccatcgcctcccgccgggcgaccgcctcaatggtttcgccttcttctatcatgccggcgaccatctccagcagccacggcgtaacgcttgtgtcatatgcggcaatacgaatctgttcgaccagcaccacctcgtcgcgttcagggtcaaagggtagcaagacggcggcgtgcccgcgctcaaaaatttcgcgctttacctcgccactcatttctccgttgaataaacgatggcggaatcgatacacatccaatgaaaaaaaaccgcgatagcgcgtttcccgtgcaataatttctacatcgcttttggtgaaagtaactggcaagttgtctgatttacgcattgtgctgccctgctagcaataatgattaaatgatgaatttcaagggtggttgactgctgttttatcacccttgtggtaaattggtgccaattaaggctcgtatggcacgtaacgccaactttttgcagtggcggattctgctagaatcagcaattatttttacaaattgatcagcgctaaatactgcttcacaacaaggaatgcaaatgaagaaattgctccccatccttatcggcctgagcctgtcggggttcagcacactaagccaggcagagaacctgatgcaagtttatcagcaagcacgcctgagcaacccggaattgcgtaaatccgctgccgatcgcgatgctgcattcgaaaaaattaacgaagcgcgtagtcctttactgccgcaactgggtttaggtgccgactacacctacagcaacggttatcgcgatgcgaacggtatcaactccaatgaaaccagcgcttctctgcaattaacgcagacgctatttgatatgtcgaaatggcgtgggctcaccctgcaagaaaaagcagcaggcattcaggatgtcacctatcagaccgatcagcagacgctgatcctcaataccgcgaacgcgtattttaaggtattgaacgctattgatgtgctttcctatacccaggcgcaaaaagaggctatctaccgtcagttagatcaaacgacgcaacgttttaacgtgggtctggtcgccattaccgacgtgcaaaacgcccgtgcgcaatatgataccgtactggcgaatgaagtgaccgcccgcaacaacctggataacgcggtagaagagctgcgccaggtaaccggcaattattacccggagctggcgtcgcttaacgtcgagcattttaaaaccgacaaacccaaagctgttaatgcgctgttgaaggaagcggaaaaccgtaacctgtcgctgttgcaggcgcgtttaagtcaggatctggcgcgcgagcaaatccgtcaggcgcaggatggtcacctgccgacgctgaatttaacggcctcaaccggcatttctgatacctcttatagcggttctaaaaccaactccacccagtacgacgatagcaacatggggcagaataaaatcggccttaacttctccctgccgctgtatcaaggtgggatggttaactcgcaggtaaaacaggcgcagtataacttcgtcggcgcaagcgaacagctggaaagcgcgcaccgtagcgtggtgcagaccgtacgttcttcctttaacaatattaacgcctccatcagcagcatcaacgcgtataaacaggcggtcgtttccgcgcaaagttctttggatgccatggaagccggttactcggtcggtacacgtaccattgttgacgtactggatgccaccaccactctgtatgatgccaagcagcaactggccaacgcgcgttatacctatttgattaatcagttaaatatcaaatatgcgctcggtacgctgaacgagcaggatctgctcgcgcttaacagtacgttgggtaaacctatcccgacgtcgccggaaagcgtagcgccggaaacgccagatcaggatgctgccgcagacggttataatgctcatagcgccgcgccagcagtacagccgaccgccgctcgcgccaacagcaataacggcaatccattccggcattgataagttattcgctggcgctgcgcttatcagacctgtgcccttgtaggtctggtaagcgcggcgctacctgtcataaagccgcgcctgaacgtaagacaacgtaaagatcctgctattccgccgcattctcgccttttctcgcttcaatttcgaccagtcatcctctattctgaaggcatgttgtatttaccactgggtcctggaagacaaatatgaaacggacaaaatccatccatcacgcatcatttcgcaaaagctggagcgcgcggcatttaacgccggtcgccctggcggttacggctgtttttatgctggctggctgtgaaaaaagcgatgaaaccgtatcgctgtatcaaaacgctgatgactgttcagcggcgaatccgggcaaaagcgcggagtgtacaaccgcgtataacaatgcgctgaaagaggccgaacgtactgcgcctaagtacgctacacgcgaagattgcgtcgctgagtttggcgaaggtcagtgccagcaagcgcctgcacaggctggcatggcgccggaaaatcaggcgcaggcccaacaatccagcggcagtttctggatgccgcttatggcaggttacatgatggggcgtctgatgggcggcggcgcaggctttgcgcaacagccgctgtttagctcgaaaaacccggccagccctgcatacggcaaatataccgatgcggcaggtaaaaactacggcgcggcgcaaccgggccggacaatgaccgtaccgaaaaccgcgatggcgccgaaacctgccaccacaacaaccgttacccgcggcggttttggcgaatccgtcgccaaacagagcaccatgcagcgtagcgctgccggtacttcaacacgttcgatgggcggctgatacgcatggaaagagtcagtattaccgagcgcccggactggcgcgataaagcgactgaatacgggtttaattttcacactatgtatggtgaaccgtactggtgtgaagacgcttattacaagttaacgctcgcccaggtggaaaaactggaagacgttaccgccgagttgcaccagatgtgcctcaaggtagtagaacgcgtcatcgccagcgatgagctgatgacgaagtttcgtattccaaaacatacctggggttttgttcgtcagtcctggcaaacgcaacaaccgtcgctctattcccgcctcgatctggcctgggacggcatcggcgagcctaagctgctcgaaaataatgccgacacgccaacgtcgctgtatgaagcggcgtttttccagtggatttggctggaagatcagatcaacgcgggcaatctgccggaaggcagcgatcagtttaatagcctgcaggaaaagctgattgaacgctttgctgaacttcgcgaacagtacggttttcagttgctgcatctcacctgctgtcgcgatacggttgaggatcgcggcaccattcagtatttacaggactgcgcggccgaagcggaaatcgccaccgaatttctctatatcgacgatattggtctgggggaaaaaggccaatttacggatctgcaggatcaggtcattgcgaacctgttcaagctctatccgtgggaatttatgctgcgcgagatgttttccaccaagctggaagatgccggcgtgcgctggctggaaccggcctggaaaagcattatctccaataaagcgttgttgccgctgttgtgggagatgttccctgaccatccgaatctgttgcctgcgtatttcgccgaagacgaacatccgccaatggataaatatgtcgtgaaaccgatcttctcccgcgaaggggcgaacgtatcgattattgagaacggtaaaacgatcgaatccgtggaaggcccgtatggcgaagagggtatgatcgtgcaacagttctatccgctgccaaaattcggcgacagttacaccctgattggtagctggctgattaacgatcagcccgccggaattggtatccgtgaagatcgggcgctgatcacccaggatctctcccgcttctatccgcatatttttgtcgaaggatagattctcctgtaagcccgatgcgcgtagcgccatcgggcaatcattcagcgccttatccggcctaccccacctgcaccgacaacatacttatactgcccatctcaataccgtcgaccgggatggtgataggttccttgccgtcccaggcgccaagtacatacagcaaaggcaaaaagtgctccggcgtcgggttcgataaggcgcccccttcatgttgcagataattcaccagcgggtgctgttctaccggcccctgccacgtcagattggctttcacaaagtcattaaatgacgccgcccagggatacggtatattgtcaccgtgccaacgcacagtccgcagattatgaactacattcccgctggccaccagcatcacgccttcgtcacgcagcgtcgccagcttacgacccacctcaaaatgccatgccgccggtttggtactatcaacactaagctgcaccatcgggatatccgcattcgggtacatcttgatcaatacgccccaggagccgtgatcaaatccccacgcttctttatcgagcgcgacgggaacgggagccaacagttcaaccagacgctgcgccagcgcaggcgatccaggggccggataatgcgtgtcatacagcgcctgcggaaaaccgccaaaatcatggagagtttgcggcctttccatcgctgtgacgccagtcccacgggtataccagtgcgccgacaccaccactatcgcctgtggtcgcggtagggcttcccccaatcgccgccaggcgcgggtataatcgttatcgtccagcacgttcatcgggctgccatgccccaaaaacaatgctggcatacacgttaaagacatgatgttatccttactggaaagacattttgttaacatcaccatacgctttcttcacagaggaagaactcagataaccatgatgaagatcatcagttattttgaaggtcaggttcggacggcaaattgataaggagtaatggatgtcagtaccacttattctgaccttactggcgggcgccgccacctttattggcgcgtttcttggcgttctcggccaaaaaccgtctaaccgcgtgctggctttttcgctgggcttcgccgcagggatcatgctgcttatctcgctgatggagatgctgcccgccgcgcttgataccgaggggatgtcgcctgtactgggctacggaatgtttattatcggcctgttgggctacttcgggctggaccgcctgcttcctcacgctcatccgcaggatctggtgcaaaaaaggcagcagccgcttcccggctcgataaaacgcactgcgattttattgacgctcggcattagcctgcacaactttccggaagggatcgccacctttgtcactgccagcagcaatcttgaactgggtttcggcatcgcactggcggtggcgttgcacaatattcctgaaggtctggcggttgccggcccggtttatgccgcgacgggctcaaaacgtaccgcgattttttgggccggtatctccggcatggcggaaattcttggcggcgtgctggcgtggctgattttgggcagcctggtttcaccgatcgttatggcggctatcatggcggcagtcgccggcattatggtggcgctctccgtcgatgaactgatgccgctggcaaaagagatcgatcctaacaataaccccagctatggcgtgctttgcggtatgtccatcatggggctcagtctcgtcattttgcagacgataggtatcggttaagagaaacgtcgcgccggattcaggcctttagccaggcaacatccggctgcccgtcaaggatatgcgctatttctgctcattcatcacgctgtcgccttcgctcgtctggcgaaaacgtttcgttcgcgcttcaagtaatgcatctctgtcttgccgaaacgctctgcaataacgcttcatatggcaaatataccctactaccaccagaacgattaatattatccaataccaggcaataaacatcctttttacccttaaaatttaacatcactaaacatttaacgttaaaattttacatacccttattttgacgtattcatatactggcatatttgtggaacaaataaatgattttgatcatataaatcagtggtgaaacacaataatgaaagaggtattaagcagaaaacaatgtcgataagatcacacttcgtactaatttatattgttcttaaaatatcacactcctactatcgactcactcaggcaattaaaaaatattgatacagaatatactttaaaataagtaacagcatcatgacttatatttaaagaccaatcatttacctcatttattattcataaaaacatagtatattcagaagtattatatttagaagttgtatataaggagatatatccatgtttgaccaataccggaaaacaatacttgccggtgccgtcgcactgacatgcggactcaccgcagccagtacgtttgccgcaggttttcaaccggcacagcccgcaggaaaattaggcgcagtcgttgtcgatccttacggaaatgcccctctcaccgcgctggtggaattagatagccatattatttcagacgttaaagttactgtacatggcaaaggggaaaaaggcgttcctgttacttataccgttgggaaagagtctttagaaacctatgacggtattcctatttttggcctttatcagaaatttgccaacaacgtcacggtagaatataaagaaaacggcaaagccatgaaggatgactatgtggtgcagacgtccgccatcgtcaaccattatatggataaccgttctatttcagatctccagcaaacgaaagttattaaagttgcgccaggatttgaagatcgcctttatctggtaaatacccatacctttacgccgcagggcgctgaatttcactggcacggcgaaaaagataaaaatgcgggcattcttgatgccggcccggcgggcggggctttgcctttcgatatcgccccttatacgtttgtggtcgacacccagggtgaatatcgctggtggctggatcaagataccttctacgacggccacgatatgaatatcaacaaacgcggctacctgatgggtattcgtgaaacgcctcgcggcacctttaccgcggtgcagggccaacactggtacgagtttgacatgatggggcaaattcttgccgatcataaactgccgcgcgggttcctggatgcgtctcatgaatccatcgaaaccgtgaacggcaccgtactgctgcgcgtcggcaaacgagattaccgcaaagaagacggcatacatgttcatactattcgtgaccaaatcattgaggtcgataagtctggccgcgtagtagacgtttgggatttaaccaaaatcctcgaccctatgcgtgatgcgctgctcggcgcgctggatgcgggcgcagtatgcgtgaacgtcgatctggcccatgccggacagcaggcgaaacttgaaccggatacgccgtatggcgatgcgcttggcgttggtgccggtcgtaactgggcgcacgtcaactctatcgcttatgacgcgaaagacgactccatcatcctttcttcccgccatcagggtattgtaaaaattggtcgcgataagcaggtgaaatggatactggcaccgtctaaaggctggaataagcagctagccagtaaattgctgaaaccggtagacgatcatggtaagccgttgacctgtgacgaaaacggcaagtgtaaggacaccgatttcgatttcacctatacccaacatacggcatggctttccagcaaaggcacgttaacggtctttgataacggcgatggtcgcggcctggagcaaccggctctaccgaccatgaaatattcccgttttgtcgaatataagatcgatgagaagaaaggcaccgtacaacaagtttgggaatacggtaaagaacgtggatatgatttctatagtcctattacctcggttgttgaatatcaaaaagaccgcgacaccatgttcggctttggcggttctattaacctgttcgacgttggtaaacccacagtcggcaaactgaatgagattgactataaaacgaaagaagtgaaagttgaaattgatgtgctgtcggataaacccaaccagactcactatcgtgcattactggttcatccaacgcaaatgtttaaataaataacgggaaggaattaatatgtcatctaaatggattacctctttatttaaaagcgtagtattaaccgcagcattggtcactccttttgcggcatcggcttttaccgagggcacagattatatggttctggagaaaccgattcctaatgcggataaaacgctgattaaggtatttagctacgcctgccctttctgctacaaatatgacaaagccgtaacaggtccggtttctgataaagtagccgatctcgttacgttcactccgttccacctggaaacaaaaggcgaatatggcaaacaggccagcgaagtatttgcagtcctgatcgccaaagataaagctgccgggatttcgttatttgatgctaaatcacaattcaaaaaagcgaagttcgcctggtatgcggcttaccatgataagaaagagcgctggtcagatgggaaagatccggcggcatttattaaaaccgggctggacgccgcaggcatgagccaggctgattttgaagcggcgctgaaagatcctgccgttcaggagacgctggaaaaatggaaagccgcctatgacgttgccaaaattcagggtgttccggcttacgtcgtcaacggcaagtaccttatctataccaaaaacatcaaatccatcgattctatggctgaactcgttcgggaactggccactaaaaaataagcagggaaacgattatggattttattaagggattatggcgagacctacgcgcaagaccagtggatacgctggtgagatggcaggaacagcgctttctgtggctgttaatggccatcgcgatgggaggattaattatcctggcgcactcgttcttccaaatctacctctacatggcaccgtgcgagcagtgtgtttacatccgttacgcgatgtttgtgatggtaattggcggggtgattgcggcgataaatcccaaaaatatcgtgctgaagctgattggctgcatcgcggcgttttatggcagcattatgggcattaagttttctattaagcttaatggtatccatcatgcggtacataatgcggaccccgattcactttttggcgtgcaaggatgttcgactgacccgacctttcctttcaacttaccgttggcggaatgggcaccggagtggtttaaacctaccggagactgcggttatgacgcgcctatcgtccctgatggcgtaacgctcagtagcgtacagcagtggtttgtcgatctctaccagcagtccgaaggctggtatctgcttccgccctggcactttatgaacatggcgcaggcatgtatgttggcctttgggttgtgcctgattctgctgctggtgatgagcggcgcctgggcattgaaactggccagaggcaaataacctgaatagataaaccaaagcagaggtctgcattcaggcctctgcttttctcacaataattttaccattcagcttattcgtcgttctttgaaactgaacgatatggcaccgaaggaatacaaaaaagccgatgacatctcatcggcttttttcaaccatgatccgttcgatcagctggctttgcgctcatgcgcctggcggtaagccaccagatcttcaatcgtgactaccgccatattatgctggcctgcaaacgcgatacactccggcgcgcgcgccatcgtcccatcgtcgttagtcaactcgcacagtacacctgcaggtttaaaaccggccagcgtcatcagatcgatggtcgcctccgtatgaccgccgcgcgtcagcacgccgcccgcctgagcgcgcagtgggaaaacgtgccccggacggttaagatcggacggttttgcgccatccttaattgccgcacgcaccgtagtgacacggtcagcggcggaaacgccggtggtcacgccttctgcggcttcaatggtcacggtaaaaccggtgccgtaggcgctggtgttgttttccaccatcattggcaagtcgagctgcttacgacggtcttcagtaatacacaggcaaacaataccgctaccgtgacgaatggttaacgccatctgttctacggtcatcgtctctgcggggaaaatcatatcgccttcgttttcacgatcttcatcatcaagcaccatcacaccgcgtccttcacgcagcgcatccagtgcaagttcaacacgttcaaaaggcgtaccaaaagaggaaagtagcgtctgattcatggtaaaaaaacctcattaatattatggttaccagaatcagggcagtcttaggagtgccgacaagcggcaaaaaaataacgtgagcgggtccatgcccgactggatcgttaccctctcccatccggactttaaccgtcggccccggaattacaccggatctgctgaccttttcgctatggcaaaaagcgctcgcgggctttcaacctgctctccgcgttccgtcacggcgcgccgtgatgagaaatgcgttaaacatcgctgatttaccgccggtggggaatttcgccccgccctgagaataagcgggttaactataacgctattgattaccttcatcaacgcctttactccgtatgacgtcacacaattctggtttatggcgtccacatatcgcactacaataagagctaacacttaccagttcagggaaaccacaatgattgacccgaaaaaaattgagcaaatcgcacgccaggttcatgagtcaatgccgaaaggtattcgcgagttcggggaagatatcgagaaaaaaatccgtcaaacgctgcaatctcagctgacgcgtctcgatctggtgagccgcgaagagtttgatgtccagactcaggtcttgctgcgcacccgggaaaaactggcgctgctggagcaacgcctcagcgaactggaagctcgcgacaagcctgaagaagtaaaacctgcgcccgccattccgccagtcgatccacaacaagagtaaaaacgtgaacgggcctgacggcccgctcatataagatctgaataatgccctgcacctgtaaagggagcctgcattagtgttctaattctaaccttttcgcctgagtcgcctgctggcagtaaagcgcgtaacgcttgcaaaaccagtcgcgatgctcctcgtccatattgccggttaccgcctggatatcaacaggacgcccctccgcctgcattctggcaaaactgcgcgccagaaaatcgaaattatttaatgaatagacgttattgttgttcatcagcataccctccagttattgaattctgttaaggctatatgctttttctgatttcagtatttccctatatgtacggcggttttatacataacgtgcgcaaatttaatgcgcaaaatcacaatattcaccaaagataacgacggataaatcgcttttcggacttaaggagatatgggtcacatgatattgtaacgcaatgaaataacaagcatgaaaattatcacgcgaacatccttctgaaggcggcgacaaggatagaaaatatgaccttatttgcggagtataacagcccctatctgtttgccatcgcgttcgttttctttatcggcgtgctggagatgatttcgctgatttttggccactttctttcaggcgcgctcgacgcccatctcgatcattatgacgccctgtcatccggccctgcgggccaggcgcttcattatctgaatattggacgcgttcccgccctggtcgtcctctgtctattggccggttatttcggcctcttcggtatcctcatccagcatggcgggatcatgctctggcaagcgccgctcagcaatctgctgctggtcccgttgagcattgtcctgtcggtctttgccgtgcattacagcggaaaaatcctcgcgccctggctacccagagatgaaagctccgccctccgggaagaggaatttatcggcggcatggcgattattaccggccacgccgccgtcgccggtacaccttgcgaaggaaaatttaccgataagttcggccagattcactatttactgctggaacccgaaaagggaaaagaatttaaaaaaggagacaaggtgctgattgtctgccgactttccgcaacgcgttatttggctgagcgtaccttctatgtttaattgagaggaacttacataatggatgatgtttttggcatattgccatcatggatgtttaccgccatcgttgcggttatcgtcttactaattatcgggatcatttttgctcgcctctatcgccgcgcatctgcggaacaggcatttgtccgtaccgggcttggcgggcaaaaagtggtgatgagcggcggcgctattgtgatgccaatctttcacgaaattattccgatcaatatgaataccctaaaacttgaagtcagccgtgctaccgtcgacagcctgatcaccaaagatcgtatgcgcgttgacgtggtcgtcgctttcttcgtacgtgtaaaaccctctgttgaaggtattgccaccgccgcacaaacgcttggccagcgaacgctgtcgccggaagatctgcgtatgctggttgaggataaattcgttgacgccttacgcgctaccgcggcccagatgacgatgcatgagctacaggatacgcgtgaaaacttcgttcagggcgtacaaaacaccgttgcggaagatttgtcgaaaaacggcctggagctggaaagtgtctcattaaccaactttaaccaaacgtccaaagagcatttcaatccaaacaatgcctttgatgccgaaggtctgacgaaactgacgcaggaaaccgaacgccgccgtcgtgaacgtaatgaagtggaacaggatgtggaagtggcggtgcgcgaaaagaaccgcgacgcgcttgagcgcaagctggaaatcgagcaacaagaagcctttatgactctggagcaggagcaacaggttaaaacccgcaccgccgaacaaaacgctaaaattgccgcttttgaggccgagcgccatcgtgaagcagaacagacgcgcattcttgctgagcggcagatccaggagacggagatcgaacgtgagcaagcagtacggtccaggaaagttgaggccgagcgtgaagtacgtattaaagagatcgaacagcaacaggtgacagaaatcgccaaccagacgaaatctatcgccattgccgccaaatccgagcagcaatcgcaagcggaagcgcgcgccaacgacgcgctggccgatgcggttcgcgcccagcaaaacgtagaaaccacccgccagaccgccgaagcggatcgcgccaagcaggtcgctctgatcgccgcggcgcaggatgcggaaaccaaagcggtcgaactgaccgttcgggcaaaagcagagaaagaagcggcagaattgcaagccgccgctatcatcgaactggcggaagcaacgcgtaaaaaaggtctggcggaagccgaagcgcaacgggcgctgaatgacgctatcaacgtactatctgacgaacaaaccagcctcaaatttaaactagcgctcttacaatcgttgcctgctgttattgagaagtctgttgaaccgatgaaatccatcgacggcattaagattattcaggtcgatggcctcaatcgcggcgcgacggcgggcgacgtcgccgctggcggcgctaacgggggaaacctggcggaacaagcgttatctgccgcgctcacctatcgtacccaggcaccgctgatcgattcgctgttaaacgagattggcatcgctggcggctcgctaaaggcgctgaccacgccgttggtttcatcggcaacggatgagattaatcgcgaagcaacgataaaagagcaataaccccccgccatatctcctgtccctggtcataagaccggggatttttttatcttttttccaccttgtctgtacaaagcgttatgaccagcaggccattttgcgtgggcgatccagtaacgcaaaatcggcgggagaaagcccttgcgccagacaggccactcaccaacaatcgcgatgtcagcaaggggctgaaacgggaaagcccctcccgaggaaggggctttaataaggaaagggttatgatgcaccaggtcatcatactgattgttctgttactgataagtttcgcagcttactaacagacaatcagagggggggagagatcccctctcacccttattcctttactttaggtcgaaaaaaaagcagcgtcaaccgcgagatacgcgtcgaaacaaaatgtccgacgcgccttcaaaatcagcgcccgccgcgtctgtaacgcctgatgacgcggttttacttctcgctctcggtctggatctttttgatgatattggtcgtggaacaaccatcttcgaagttcagcaccatgacttcaccgccgttggcccagacctcttcgctgcccgcgatctcttccggcttatagtcgccgccttttaccagcagatccggcagaataccggcaatcagtcgttgcggcgtatcctcttcaaaagagacaacccagtcgaccgactccagcgcgcctagcacgatcatacgctgttcgagcggattaaccggacggctttcgcccttcaggcgtttagtcgaggcgtcactattgaccgcaacaatcaggcggtcgcccagtttgcgcgcgttcgccagataagagacatggcccgcgtgcagaatatcgaaaacgccgttggtcatgaccactttctcgccacgcttacgcgcgctggcgacggcctgtctcaactcctcttcggtcataacgccgaagccggtatccgcgcgtccgcgcactgcgttttccagctcaataggggaaaccgttgacgtcccgagtttacctaccactacgcccgccgccgcattggcgaaataacacgcctcttccagggtatttcccgccgccagcgtcgccgccagcacgccgatcaccgtatcgcccgcaccggtaacatcataaacttcctgcgcctgcgtcggcatatgtagcggcgctttattcggttgcagcagcgtcattccctgttcggaacgcgtgaccaacagcgcggaaaggtcgtaatcagcaatgagtttcatgccgcgttcaaccagttcgtcttcgcttttacatttccccgcgaccgcctcaaattcagaaaggtttggcgtcagcagcgtggcgccgcggtaacgttcaaaatccgttcctttcggatcgatgagcaccggcacgcccgcctggcgcgccagggaaatcatagtctgcacgctggtcagagcgcctttggcataatcggacaataccagcgcgccgatcgatcccagcgcctggttgatacgctcatgcaacggctgcgggtccacgccctcaaagccttcttcaaaatcaagacgaatgagctgctgattacgtgatagtacgcgcagtttggtaatcgtcggatgcgtcggcacagaaacgaagtcgcacttcacattgacctccgccagcgttttgctcagcgcgcgcgcggcgtcatcaatacccgtcaggccgaccagacgggcgttcgctcccagagacgcaatgttcatcgccacgttcgccgcgccgcccgggcgttcctcaacggtatttaccttaaccacgggcaccggcgcttccggtgaaatacggcaagtggggccataccaatagcgatccagcattacatcacccacaaccatgacgcctgcacgttcaaacgctggcagatttactttcattcctgtctcctgagagattcaaaatttgcgcgcgataatagcataattcaaacggctaccagccacttccgccagcttgcctgcaccagcgcgcgctctttgctaaaacacgtctgcgccacatgaccgggaagctcctgcaacgccaggtggtgcagttcatcacgcagtgtggtgtaggctaccgtcagcgcctgcgcctcgtgttcatccataatgccgttttgcgccagaagctccaggatgcgcacgttatcagaccagcgcgttaatttaggtttttcatgagcgtagcgcagtaccagatattgcgcgataaactcaatatccgtaataccgccttcatcagctttaatatcaaaacgatcacgatgcttattgccgagatgcgcccgcattttctcgcgcatttcacgcacttcagtctgcaatgtcttgccgtcgcgcgccgtcgtcatgatagtgcggcgcaccgcatcaaactgtgaggtaagctgcgggtcgccatataccacgcgagcgcgtaccaatgcctgatgttcccaggtccaggcttcatgctgctgataatcggcaaacgcgtccgctgaagtcaccagcattcccgccgcgccagaggggcgtagacgcgcatccacctcatacaaaatgccggaggaagtgcgcgtactgaacagatgcataatgcgctgcgccaggcgcagataaaactgccgcccgtcgatttcgcgttcgccgttggtcatgacgtccatcggacagtcatgcaggaagatgagatccagatcggaactgtagcccagctcccatccgcccaacttgccataaccgacaaccgcaaacccccgcccctggcgctcgtccagatgcgctggctgaccataacgcgcaaccatttgcgtccacgcctgctgcaccacagcatcaatcatcgcctccgccagccatgtgaggtgatcgcttactttcatcaccggcagcgtaccggcaatatccgccgccgcaatccgcaaaagctgtgcctgtttaaactggcgtaatgcctccagttgttgttcttcgtcctcttccggcacgcgcagcaaatattggcgtaattcgtcgcggtaagcgtcggtagccgtcggctgataaagcgtgccggggtcgagcagttcatcaagcaacaacggataacgcgccaattggctcgctatcattggcgaagcggcgcagagcataatcaggtgtttcagcgcgccgggaaattcgctcagcagctccagataggtggtgcgagtgacaatccccgccagcaacggcgttatccgcgatagcgtaacagcggcgtcttcgcgagaacagacatcagcaagcaggtgcggcatcagttggtccagcacttgccgcccgcgcgggccgatagggcgtttatccagttccttacggaagtcagcgatgagggtcagaacctgtcgccgctcctcatcggctaaatgcgccagcactggcgtcgaatcatcctcctgtagcgcatcctgccatacttcacgccacggctctgaacgttcttcctcctgcggggtatcggcttcatcatcgccaattaattcgttgaatacgcggcgtacattagccatatgatccgtcagttcaccaacaagctgcggccagttctccgccttcattccccaggccagccgcgcccgattcagatcgtcggcaggcaacgtttgcgtctgttcgtcattgatgctttgcagcagattctccagacgacgtagaaaaagataggccacgcgcagttgcgccacgtcattctcaggcagcaaatgcagcgcagcgatagcatccagcgtcggcagtaacgaacgcgactgtagcgacggctcgcgtccgccgcggatgagctggaatacctgcacgataaactcaatttcacgaataccgcccgcgccaagtttaatgttgtctttcaaaccgcggcgtcgcacttcgcgggcgatcatccctttcatattacgtagcgactggatgacgctgaaatcgatatagcggcggaaaacgaaaggccgcagcatggcgcgtaattcacgagaccaggcgtcgtcgttatcgcccattagccgcgctttcaccatggcgtagcgttcccagtcgcgtccttgctcctgatagtaatcctccagcgcggcaaaactcagtaccagcgggccgctgtcgccaaacggtcgcaggcgcatgtccacccgatagacaaaaccgtccattgtgggctgatccagcgctttgatcagccgctgcccgagacgcgtaaaaaactgggcgttatcgagttcacgacgcccgccccgggtctcgccatgttccggccaggcgaaaatcagatcgatatcagacgaaaaattcagttcgccgccgcccagcttgcccatgcctaaaatcaacagcggctgcggaacgccctgcgggttacagggggttccccattcgcggcaacaggcggcatacagccagtcgcgcgcccccacaatgagcgtctccgccagatggctcaactgttgtaaaatagtctcatcgtccaccagcgacagcgtctgtgcccaggcgatgcgtaccatgatgcgacgacgaaaaaacctcagttcacgcatcagcgaggcgtcgtcacagacacctgccaacgcctcctgtaaccagccagcataatgtcgccattcatcagcctgcggcgatgcggattccagttcggcaagccactccggatgcgctatcacgctatccagcgcaaaatcgctaaatgtaagtactgacttcgcctgcacgctaagcgatgtctcagtaaatccttctggtaggcgctcaacaacggtctgccagtactgcgataagggtgaagagagcggcgtcatttaggggatatcctttaaataatgccgggtggcggcgtttcgcctgatccggcctacaagtccgcataccgtaagcctgataagcgcagcgtcatcaggcgctttctacggttctgattatcgttttccgctgtgcaaccagaacggctgctggttgatggcctcattacggaaatgttcaatttcaatacgttgcccggtaataatggcgtgacgcaatccctgccagttctccagccatgcctgcgcgaccatcgcatcataatacccggccagcagtaaaacgctgtcaatatcgcgagtcaaacgcggcaactggtcgcgatatttatcacccagcggttgtccaaaaactttttttaattcagcagcatgacgagaaagatgaatgtcggcgaaacgcttaaaagaatcggccattttggcctgcgccttcgcgtccagaaatggctgccaggctttcgtcaccagccattccgtcaatgccagtttcgccatcgccgtttgcgtactataaacggctgtgacggcggacaccgcggatgtcatcgtcgcttccgcctgggtaagtagatcacgtaagtgagcgctcgctttacgcggaacaatgccaccaaagagcattaaggcatggcgcaccaaccccatagcatccagcacgtgttctttcgccgacttgtcgccgcgcagccagagctcttcatggtactgccactgtgacaacgccagatccagcgaggcctccagcccttgctctaccgtggctttcgcggcggtccgcagaattgtcgttggtgtattctctcgcggcgcattcccctgcgccaggtgataacctcgcgctgccttactcagactgccctgacgcaaaccggtttgcgacagcagttgcttcgccagttttaacacggcgcgcgtatcgccgcgaagcaactcaagctccagctcacaaatcggttcggcaaactcgcccgcttttacgtcgccgagatcgagcgcaatttcaatcctgctgccgtcaacgtccagacaccatttttcccggtaaaaatcggtactgaacagcggctgtacgcttgatgccaggccggcgggcaggttgccatccggccagacctccgccggaagttgcgtcagatccagcacgggttcgcttagcgcgacattgtattcgggtcgctggtgcagccccccgttacccggccggcaattttcatggtcatttcatagcgcccattttcaccacgaatacgcagccccatatcatggcggcgtagccagttatcaggcgtttcgaagtagatattcagcaactggctgggcgcatgatgctcgccgccgagcgtatgaagatgatttcgcagcgcatctacggcgtcgtgattgacgataaactttaattcgatttcctgagccatggccttgtacttatgggttatgtcacatctgggaagattcttggcgaacttacccgcattatttttgtcagtagatagtattttgcgccaaattgccatgcaacgagcaatttgacgggcgtaaaagtttgacgtagcggcaaaggcgacacagatgattccgattgatgtcgactactttgcgtagcgacactgatgccgttactatcgttccactttctctgacaataacgacagcctgatgccaaaattacgcctgattggactaactttacttgcgcttagcgccaccgccgtctctcatgctgaagagacgcgttacgtttctgatgaactgaatacctgggtccgcagcggtccgggagataattatcgccttgtgggtaccgtcaacgccggcgaggaagtcacgctcttacagagcgatgccaactatggtcaaatcaaagacagttctggtcgtactgcctggataccgttaaaagaactgaataccacgccaagcctgcgtacccgcgtgccggatctggaaaatcaggtcaaaacgttgactgataaactcaacaatattgataccacgtggaatcagcgcaccgccgatatgcagcagaaagtggcgcaaagcgacagcgtcatcaacgggctaaaagaagagaaccagaagctgaaaaacgagctgattgtcgcgcagaaaaaagttagcgccgcgaatctgcaactggatgacaaacagcgcaccattattatgcagtggtttatgtatggcggcggcgtattgggtattggcttgctgttagggctggtgctgccgcatatgatcccaagccgtaaacgcaaagaccgctggatgaactaaatcgccttctctgcggcactgtcttatcattagaggatgatcgtttttaaaaggaaagtggcgtgaagatttatctggtcggtggtgcggttcgggatgcgttgttagggctaccggttaaagataaagattgggtcgttgtcggcgccacgccgcaggagatgcttgatgcgggctaccagcaggtaggccgtgattttcctgtgtttctccatccgcaaactcacgaagaatacgcgctggcgcgtactgagcgtaaatccggttccggctacacgggcttcacctgttatgccgcgccggacgttaccctggaagccgatctccagcgtcgcgatctgaccattaatgctctggcgcgcgacgatgccggccagattatcgacccttaccacgggcgccgggatctggaggcacgtctactgcgccatgtctctcccgcgtttggcgaagatcccttgcgcgtattgcgcgtggcgcgttttgctgcccgttacgctcatcttagtttccgtatcgccgatgaaacactggcgctaatgcgcgaaatgaccgcggcaggcgagctggaacatctgacgccggaacgggtatggaaagagacggaaaatgcgcttaccacccgcaatccgcaggtttacttccaggtattgcgcgactgcggcgccctgcgcgtcctgtttccggaaatcgacgccctgtttggcgtacccgcgccggcaaagtggcatccggaaattgataccggagttcatacgttgatgacgctgtcgatggccgccatgctcagtccgcagcttgatgtccgtttcgccacgctttgtcatgatctgggcaaaggcttaacgccgaaaaacctctggccgcgccatcatggccacggcccggcgggcgtgaaactggtcgaacagttatgccagcgtttgcgcgtccccaatgacctgcgtgatttagctaaactggtcgccgaataccatgatctgatccacacctttccgatactccagccgaaaacgatcgttaagctgtttgacgccattgatgcatggcgtaaaccgcagcgcgtcgagcagattgcgctgaccagcgaagccgatgtccgtggacgtaccggatttgaagcgtcggattacccgcaggggcgctggctgcgcgaagcctggcaggtggcccaagcggtaccgacgaaagaggtggtggaggccggatttaagggcattgagattcgcgaggagctgacgaagcgacgaattgcagcggtcgccaactggaaagagaagcgctgcccgaaccccgccagctaaacgccatccggcacgataaattgcctgatggcgctgcgcttatcagaccgacaaaacagttaggccggacaaggcggtactccgccatccggcacggtcaatcatcagaagaagacaacgtaaacggcagccgccaccacaaagcggtaaatcgcaaacggaataaacgagatacgcttaatcagttgcaggaaggtcttgatagcgatcagcgccaccacaaacgccgtcacaaagcccaccgcgaacattggaatatccgctgcggtcaggaatgaccaacttttgtagagatccagaaccgttgcgcccatcatcatcggcacagccagtaagaacgagaactcagaggcggcgtaacggctgacgcccatcagcatcccaccggaaatggtcgctccggaacgcgagaagcccggccacagcgccagacactggaaacagccaatcataaacgcctgacgatacgtcatatcatccagccccggcgcgcgcggttctttcggcttcaggcactcggcggcaatcagcaacagaccgcctaccaccagcgcgtacatcacgttaattgggttaaatagcgacttgatcgtgtcatgaaagactaaccccagcaccaccgccggaatcatgcccagcaggatgtgaatcaacgttaatcgacctttactttcaccttcacgctgtagcgggcggccaaagtgaataccgatgagaccaaacaaccgccgccagaacatcaccacgaccgccagaatagatccaagttgaatcaccacttcgaatgtcttggccgtatcgccttcaaaccccagcagatgacccacaataatcatatggcccgtgctggataccggcaaaaactccgtcaatccttcgaccacacccaaaattgccgctatcagcagcgagtgcatatcgctcatcaataaacccctaaaatgaaaaacactgcaaaaatggatctcgcgttaagaccccatatataaccgtttggtttaaaaaatataaaattatttatttttatttcagattattgccacgctcaataattacccctacgttcgccgcgcgcgcgacggcgccaggcttactcagtttgatgcgaacccacggagaattgaatcggctaagcagcagatccgccacctcttccgccacacgctcgaccagagcaaaacgcccgccttcaacatgatttatcaccgtgtcggcgatatccgcgtaacttagacaatctgcgacatcatcgcttttcgccgacttgcggttatcccatgccatttcgatatcgaacaccagtttttgctcgatagtctgttcccagtcgtaaacaccgatagtggtgattaccgaaagttgctctataaatacaatatccatcacgacctgcctgctttttggctaacccggataccacttccggcgaaatgtgcgtattatccacagaaatagtaaataaaacgacactttcaatacggaacagcttatgagtgcaatcgcgcctggaatgatcctcttcgcgtacctctgcggctcaatttccagtgccattctggtttgccgcatcgccgggctgcccgatccgcgagaaagcggctccggcaacccgggcgcgacgaacgtattacgaatcggtggcaagggagcggctgtcgcggtacttatttttgacatccttaaaggtatgttgcccgtctggggcgcgtatgcgttaggcgttacccctttctggctggggcttatcgctatcgccgcctgtctggggcatatctggccggtcttttttggctttaaaggtgggaaaggcgtagcaaccgcgtttggcgccatcgcgcccatcggctgggatttaaccggcgtcatggcaggcacctggctgctgacggtcctgttaagcggttattcatcgttaggggcgattgtcagcgccttgattgcgccgttttacgtctggtggtttaaaccgcagttcaccttcccggtatcgatgctgtcatgtctcattttgctgcgccatcatgacaacatccagcgtctgtggcgtcgccaggagacgaaaatctggacgaagctgaaaaagaaacgccagaaagattgagctggagctgcgtctggaagagggccgcaaccgtctggggatcggcccacaagggttgaccggcaatagctcggttgatgggcttacatatcgaatccgccgcgcgtcacccttccaccattggcgtggttaggcgcgattttcggcctgatcttcctggtgctgctgatcgtctccaggctgttgtggatgcccgtcgttttgctgtaaacccgttggggcggcatgatgtcgccccctttctccgcttttacgccgccggcagctcggccagcggccagcgcggacgtaccgttacgccaagatccgccgtaacgcccgccttaaaccgcaccattccggcataggcgatcatcgccccgttgtcggtacaaaactccggacgcgcatagaacacttcgccgcggcgtttttgcatcatttcggcaagcttcgcgcgcagcgtgcggttagcgctgacgccgcccgccatgaccagacgcttaaaaccggtgctttccagcgcgcgcttgcacttgatcatcagcgtatccacgaccgcatcttcaaaagcgcgcgcgatatcagcgcgagtttgttcgtcgccgccattactacgaatggtgttagcggcaaaggttttcagaccggaaaaactaaaatccagccccggacgatcggtcatcgggcgcggaaagacaaaacgccccgccgtcccctgcgacgccattttcgacagcatcgggccgccaggataatccagccccaacaatttggcggttttatcaaacgcttcaccggcggcatcgtcaatcgactctcccagcagttcgtactgaccgattccggtcacgctaatgagctgcgtatgtccgccggagaccagtagcgccacaaacgggaattccgggggattatcttccagcattggcgccagcagatgaccttccatatggtgtacaggaatggccggcacattccaggcaaatgccagtgaacgcccgacggttgcgccgaccagcagcgcgccgaccaggcccgggcctgcggtataggccaccgcgtcgatatcgctcgccgtcagaccggcttcttttaatgccgcctgaatcagcggcacggttttacgcacatgatcgcgggaagccagttcaggcactacgccgccgtagtcagcatgtaatttcacctgactatacaattggttggctaacagaccctttttgtcgtcgtaaatagcgatgccggtttcatcgcaggatgtttcaatacccagtacacgcatgacttgttttacctcgctctaataccgcgcagtgtaggtcgaatgcgggtggatgtataccctcagtcccgacttcgtgtatactccctccccttataaaagtccctttcaaaaaaggccgcggtgctttacaaagcagcagcaattgcagtaaaattccgcaccattttgaaataagctggcgttgatgccagcggcaaaccgaattaatcaaaggtgagaggcacatgccggtaattaaagtacgtgaaaacgagccgttcgacgtagctctgcgtcgcttcaagcgttcctgcgaaaaagcaggtgttctggcggaagttcgtcgtcgtgagttctatgaaaaaccgacgaccgaacgtaagcgcgctaaagcttctgcagtgaaacgtcacgcgaagaaactggctcgcgaaaacgcacgccgtactcgtctgtactaatcttttgagagcgggctgctctcaattcagatcgagttgtagttgtaaggccgtgcttccgaaaggaatgcgcggcttgttttcgtttatgcattagcatatacacaaaatcattcatgctgcgtccaggcggcaagagagtaaatccccggcgcttacgcaagtcagcgacaggggtgagcaaacgtagccaacactacggcagcctgaagaatgacgtgtataaaaggggcatatggctggacgaatcccacgcgtattcattaatgacctgctggcgagaaccgatatcgtcgatctgatcgacgtgcgcgtaaaactcaagaaacagggcaagaactatcacgcgtgttgtccattccataatgagaaaaccccttctttcaccgtaaacggtgaaaaacagttttatcactgctttggatgcggcgcgcatggcaatgcgatcgactttttgatgaattacgacaagctcgaatttgtcgaaaccgtcgaagaattagcggccatgcataacctggaaattccctatgaagcaggcaccgggcttagccagatagagcgccatcaacggcaaaacctctatcagttgatgaatggtctgaatgacttttatcagcagtcgcttacccatcctgcggcaaaacctgcgcgtgactatctgcaaaagcgcggtctgagcgctgaaattattcagcgtttcgccattggcttcgcgccgccagggtgggataacgcgttaaagcgcttcggtaataacagcgataacaaggcattgttgctggatgccgggatgctggtcaataacgagcagggcagcacttacgatcgtttccgtaatcgggtcatgttccctattcgggacaaacgcggcagggtgattggttttggcggtcgagtactggggaacgacacgccgaaataccttaactctccggaaacggacattttccataaaggccgccagctatatggtctttatgaggctcagcaatatagtgctgaaccgcaacgcttgcttgtggtcgaaggttatatggatgtcgtcgcactagcgcaatacgacattaactatgcggtcgcttcgctgggtacctcaaccacggcagaccatatgcatatgttattccgggcgacgaacaacgtaatttgctgttacgacggcgaccgggctggccgtgatgccgcctggagagcgctggaaacagcaatgccttatatgaccgacggtcggcaggtacgctttatgtttttacctgacggcgaagacccggatacgctggtgcgtaaagaaggcaaggcggcttttgaagcgcggatggagcaggcgcagccgctctctacgtttctgtttaatagcctcctgccgcaggtggatttaagctcgccggatggcagcacgcagttagccgcactggcgctgccgctcattaatcaggtgcctggcgacgcacaccgtattcagttgcgccagacgttggggctgaagttaggcattttcgatgatagtcagcttgatcgtttagtgccaaaacaggcggaaagcggcgtttcccgcccggctccgcagctaaaacgcacgaccatgcgtatactgataggattactggtgcaaaacccggatctcgcgccgttagtgccgcccttagacgcgctggatcagaataagctgcctggacttggcttatttaaagaattggtcaaaacttgtttggctcagccaggtcttactaccggacaacttctggaactctaccgtggcacaaatgatgctgcgacccttgaaaaattatcgatgtgggacgatatagcagataaggcgattgccgaaaagacctttaccgactcactcaaccatatgtttgattcgctgctgcaactgcgacaagaagagctgatcgctcgcgatcgcactcacggtttaagcagcgaagaacgccgagagctctggacgttaaaccaggagctggccagaaaatgaatttaacggcttaaatgccgcatatcgatcgggaagcccccgacagccgcagtgagaggcagcggccaaaatataagtatgccctcgctttaaatgtcgacagctataccgtcgacaccaatcaaacgaataagtgtggataccgtcttatggagcaaaacccgcagtcacagctgaaacttcttgtcacccgtggtaaggagcaaggctatctgacctatgctgaggtcaatgaccatctgccggaagatatcgtcgattcagatcaaattgaagatatcatccaaatgatcaacgacatgggtattcaggtaatggaagaagcgcctgatgccgatgatctgctgctggctgaaaataccaccagcaccgatgaagatgcggaagaagctgctgcacaagttctgtccagtgttgagtctgaaatcggtcgtacgactgacccggtacgcatgtatatgcgtgaaatgggcactgttgaactgttgacccgggaaggcgaaatcgacatcgctaaacgtatcgaagacgggatcaaccaggttcaatgctccgttgccgaatacccggaagccattacctatctgctggaacagtacgatcgcgttgaggctgaagaggctcgtttgtccgatcttatcaccggctttgtcgatccgaacgcggaagaagagatggcgccgaccgcaactcacgtcggttctgaactctcccaggaagacctggatgatgacgaagacgaagatgaagaagacggcgacgatgacgccgccgatgacgacaacagcattgaccctgaactggcacgcgaaaaattcgctgagctgcgcgcgcaatacgtcgttacgcgcgacaccatcaaagcgaaaggccgcagccatgctgccgcgcaggaagagattctgaagctgtctgaagtgttcaaacagttccgtctggtaccgaagcaattcgactatctggtcaacagtatgcgcgtgatgatggatcgcgtgcgtacccaggaacgtctgatcatgaagctctgcgtcgagcagtgcaaaatgccgaagaagaactttatcacgctgtttaccggtaatgaaaccagcgaaacctggttcaatgccgctatcgcgatgaacaaaccgtggtcggaaaaactgcacgatgtcgcggaagaagtgcaacgctgcctgcaaaaactgcggcagattgaagaagagaccggtctgaccatcgaacaggtgaaagacatcaaccgtcgcatgtccatcggggaagcgaaagcccgccgtgcgaagaaagagatggttgaagcgaacttgcgtctggttatttctatcgctaagaaatacaccaaccgtggcttgcaattccttgatctgattcaggaaggcaacatcggtctgatgaaagcggtagataagttcgaataccgtcgcggctacaaattctccacctatgcaacctggtggatccgtcaggcgatcacccgttctatcgccgatcaggcgcgcaccatccgtattccggtgcatatgattgagaccatcaacaagctcaaccgtatttctcgccagatgctgcaagagatgggccgcgagccaacgccggaagagctggctgaacggatgctgatgccggaagataaaattcgtaaggtgctaaagattgccaaagagccaatctccatggaaacgccgatcggcgacgatgaagattcgcatctgggtgatttcatcgaggataccaccctcgagctgccgctggactctgccactaccgagagcctgcgtgccgccactcacgacgttttggctggcctgaccgctcgtgaagcgaaagtgctgcgtatgcgtttcggtatcgatatgaacaccgaccacacgctggaagaagtgggtaaacagttcgatgttacccgcgaacgtatccgtcagatcgaagcgaaggcgctgcgtaaactgcgccacccgagccgttctgaagtgctgcgcagcttcctcgacgattaattcgccgcacacgtataaacgccgccgcaaggcggcgtttttttatcaggccatgcgcaagcgccctatttggcctgcagaatttctacacagcgcgagtattcgcgccctcattccccattgctatagcccacgcataatgagcgcttgatccagttcgcgataggcctcgaccagtttttccgttttaattcggtttaagccgctgggattcggcaacacccacaccatcgtcgcgccaatggcgatcttttgtttaccccaggcgataccgcgctggctgaacccctgttcaaaagcctgtttaccaagcaccgccagcgccgcgggctggtagtcctctattttttcaatcaggtttcgtccgccgctacgtaattcatgcaacttcacctcagtcgcttgtaccgtcggtcggtcgacgagtttcgttaccccgcagcgaaaatccagtaatttttccgcctcttccggtttcaactgtcgatcggtgaaaccggccaaatgaataactttccaaaaacgattcgcgggatgcgcaaacggaaagccggtattcgccgaggagagtcccggattgatgccgcaaaaaaccacccgtagccctggcgccagtatgtccttaaccattattactcctgagcaatacaacgttctttaagtataacgggttgaaaacacattgtttataaaaacagcacccgcacggttacggctggattacagcgtaaagttacattataatccaccgccacggccccttagctcagtggttagagcaggcgactcataatcgcttggtcgctggttcaagtccagcaggggccaccaaattttagctttaaaatcatataattaagccactctaaagagtggcctttttgtttctgacagggctcaccccataccgctatttacgatgccaataggctgccgcacgtaccaggtgtggatcaaaccccttttcaaagcactgacttaaacgttttaccgttttgccttcgccagtaatccagatgaaatagtctgattctggtattgtcagctgcgacaggcgcgtttgcattgcctgttcatcgccgccaacaacatattccacagtaatatccgtcaaatgggcgagataatcgcggtatgccgcatcctgaatgctcaccagcgcggttaccgcagggcgcacaggcagacggctaagcgattccagacgacgacgtagcgcaggcataccggactcatcgcagacataaacctgacaggcatactcttccggcaccaccagcgaaccgcgcggcccgccgatcgtcagtgtatcgccttcacgggcttccattgcccaacggctggctacgccgccatcgtggataaagaaatccagcgccagctcgcgacgcgcctcgtcatacagcggcgtgtaatccctggagaccgggcgaacgccctccccccagataatgccttcctcagtgactgtcggaggcgtaaagcgacagcctggctcagggaaaaaaactttcgtgtgatcgtcaaagcccagggagatgaaaccgtccagcgcctcgccgccaagtacgatccgctgaaatcctgcgctaatacgttctacccgcagaacgatcagctcgcgaaaacgcagctcattacgaacacgctgtgggtagcgtacggatgatgtcgtcattttttgccttcgtgaagtaatacgatatatctaaattaaagttttaaatgataatgattgttaatcagtaaaaatgcaactgttttttgatagtgttctggcaacacatcgctaatcacaacttcaaaataaaacgttataaattaatagattatatcaacaatcgcttttatccttgctaaaaaccatcatttagatataaattagatatatctaaataagcaggaggcaatgatgcaaaatcaacatgaagggtgttgcaaaaaccgggatcatatgcacgatggttgctgcaaagatcgagaacatcagcatgaaggctgccatagcgcgcatcagcatgagaacgccagttgcggcggcgagcaccgtcacggacacggctgtggtcgtcatggacagggcggtggtcgacgtcagcgattttttggccacggggaacttcggctggtcattcttgatatcctgacccgggacgccagccacggctatgaactgattaaagcgatagaaaacctgacggggggcggctatacgccaagcgctggtgtgatctaccctacgctggattttttacaggatcagcaatttatcacgattagcgacgaagaaggcgggcggaaaaaaatcgcgattaccgcgaacggcgcgcaatggcttgatgaaaatcgcgaacacctgacgcatattcaggcgcggctaaaagcccgttgtgtgggcatggagttacgtaaaaatccgcagatgaagcgggcgctggataacttcaaggccgtgctggatctgcggataaaccacagcgatatcaacgacgcgcaaatcaaacgcattatcggcgtgattgatcgcgcggcgctggaaatcgccgaactggattaagcgggctgcgtgtcctcttcgcggacgcggaacacgttaaccagctcttttaaatgtaacgcctgttcgttcagcgacgccgcggcggcaacagactcttccacaaggcaggagttttgttgcgtggcggcgtcaatcaggccaatcgcgctgttaatctgcgaaataccgtcagtttgctcacggctggcctgcccaatctcgcgtaatatcacatccatctcttcgacgttatccaccatgccattaatcagggcgctggctttctccaccaggtgcatcccttcctgagtctgactggttgaatcttcaatcaaattacggatttcactggctgacgaggcgctcttttgcgccaactggcgaacctctccggcgacaacggcaaaaccacgtccatgttcgcccgcacgcgccgcttcaaccgccgcgttcagcgccagaatattggtctgaaaggcaatggaatcaatgatattgatgatatccgacatacgatttgccgtatcgttaatgacgcgcattttctgcgtcacttgattcatcatctccccattgtttttcactacgctggcggcgccggcagagagtttggtcgcttcactggtatggtcagctgtgtttttaaccgtggcggtaatctgttccatcgacgccgccgtttcttcaaccgagctggcctgttcttccgtacgcgcggccaaatcctggttaccggcgacaatttgcgccgccgccgtggagatactctccgaaccgttttgcacttcctgtacgatatccagcagacgcgttttcatcgccattaatgcttgcagtagtacgcctgtttcatctttatagtcggtggtgatatggcgagtcagatcgccatcggcaatcgcctcggcaaagcgtaccgcttcatcaagcggtcgggtaatggaacgtacgatataccatcccattacgcatccggcagcgatgcttatcagcgccagggtaattaacagcgtccggttagttttaaaatctccttcgacctgcacgcccgcgttgtgcatctgcgcatcctgaacggcgataagttcctgaactttgtccttatagaccttttgcacttgcaccgttctggtcatcatctcctgaatggccgcctgacgattatggatttgaatatcttgcaaaatacggaatctggactccaggtattgctggcgcgcttcacggatctcggtaatgattttctgcgaagccgcatcgtgacgattgctggaaagctcatccagtaacgccgtaatacgctggcttatttcatccagctctttctgcgaactctggctccagcgcccctcttcatccagtaacatgagctgctgcgcgatgatgaaatcattaaaattatcgattaacagattggctttcaccgtggtgggataatcattggtaataatgttctgcatacccgtattagcccgatcaaggctaaacaaagacagagcggaactcaccaccatgagaacaatgaataagccaaaggccataaataattttgaacgtattttaatgttatgcaaaaacatattttctccctgggattgcatatcctcatacaggaagatttatcggcaataatgttactaactttatgatattgatcgctttttatttcggaacattattagtaagtaatatttattgttcacagaaagatgaaccaaaagtgacataaattggcactaataatgaaagaaatacgctaaaaggttaaccatttcttatttattaactgagtttatacctattaataggtagacaagggagaaggaataaatatcacattatttttaacatcacaggccactgatactctctatgatggcaggcaccgccttctatcagagcgcatccgcccggtaagcctgttgctaccgggcggatgtcattaccattgctacctacaaataaacttaatgcagtaccgtgaccgcatcctccagccggctggcacggtgttttaccattgcggagacttgtgcgctctcttccaccagcgccgcatttttctgggttatgcggttcaactcgtccacggcgcgggtcaggctggaaagcccatctgtctgttcctgcgtcgactgactgatacgtgcgataagcagggtgacattttgcacctgagctacaatgtcatccatggtacggcctgcggcgtgaacctgctcggagcctgactgcacctttgttgcgctggcatcaattaatttacgaatatcgttcgccgcattagcgctgcggctggcaagatggcgtacctcgccagcaaccacggcaaaccctttcccctgctcgcccgctctcgccgcttctaccgccgcattcagcgccaggatattcgtctgaaaagcgatatcgttaattagcgtggtgatcgtcccgatacgttgcgtactgtgagcgatatcatccatcgttttaatcaccgtatccatcgcctcacctccctgagtcgccgcgctactggccgccatggaaagcttatccgcagcggaagccgtctcggaattgagcttcacggactccgccatctggttcatggtcgttaccgtttcctgaacattctccacggtctgacgggtgtgttcgttcagatcattattacccttcgccagcctttcactgccgtttctgacgctggaaacctgacttgatacgtcattgatcagccagcggcacatcaagccaagctgccccacggccctcagcgtcagccccaactcatcgctacgattaagatgttgtacgctgttgcgttcgccggtcgccactttcagcgcctgcgtcgccacattttcaatgggacgcacaatttgccattccaatagcgccgtacctgccagcatcgccaacgcgcccaacagcaacgcctgccatgaggcatccgtaccgaacaacgccaacgccagcattacggccattagccccataatgctacgcactcgccagcgaacaggcatagcgggcagtttgcccagcaaaccctgacgaaccaccaggcctttatgaattcgtttactacaccgcccttcatttagcgcctgatataaaggctcgacggcggcaacctcatcatccgtggcgcgggtacggatcgacatatatccagtcacacgcccttcacgtatcatcggtaccgcgttggcccgcacccaataatggtcgccgtttttacgccggtttttcacaatgccgctccacggttcgccctgttttagggtgtaccacatatctgcgaaggcagctttcggcatatccggatgacgcaccagattatgtggctgcgccagtaactcgtttaactgatagccgctcacttggacaaaagtgtcattggcgtgagtgatatagctttccaggtcggtcgtagacatcagagtggtatcatcatccagcggggtatttagctggctgacgtagggatgagaagacatgatagcgtcctgtgcaggttatctggatgttaatttttcgctcagatgttatttcggcgctaatctatttatctttagttgttaaaattgctctggatcgcaatttgcgattaatccttaatatttgtacgattttcacctcatcctgcgccttattttcattatgaaattgtttagcgtggacaacctttttctttaaaatctgccctggctcacctttttctcacgccgccgctaacgcaacacaccgtaaaccgtaaaacaagatctgctcaaaatgcatccaattgttaacgcatgatattaaatgttgggtaaatgtgattattcctggtgtttatcccgattttcactatgggcttagacccccgctaatccctgcaatacttaattcagtatcatgtgatacacggccctctggagctcattttgaacaggttaccttccagcgcatcggctttggcctgtagcgcgcacgcactgaatctcatcgagaagcgaacgctaaaccatgaggaaatgaaagcactaaaccgagaggtcattgactactttaaagagcatgtaaatccaggatttctggaataccggaaatctgttaccgccggcggggattacggagccgtagagtggcaagcgggcagtttgaatacgcttgtcgacacccaggggcaggagtttatcgactgtcttggggggtttggcatctttaacgtggggcaccgtaatcctgttgtggtatccgccgtccagaatcaactcacaaaacaacctctccacagccaggagttacttgatcccttgcgggcgatgctggcaaaaacgctggcggcgctgacaccggggaaactcaagtacagctttttctgtaacagcggcaccgaatccgtcgaagcggcgctaaaactggcaaaagcgtatcagtcgccgcgcggcaagtttacctttatcgccaccagcggcgcatttcatggcaaatcattgggcgcgctctccgccacggccaaatccaccttccgcagaccctttatgcctttactgccgggcttccgccatgtgccgtttggcaatatcgacgcgatgagcatggcatttagcgaaggcaaaaaaacgggcgacgagatagcagccgtgattctggagcctattcagggtgaaggcggcgtgatcctgccgccgcagggatacctgacagaggtacgtaagctctgtgatgaattcggcgctctgatgattctggatgaagtacaaaccggcatggggcgtaccggcaagatgtttgcctgcgagcacgaaaatgtgcagcctgatattctgtgtctggcgaaagccctgggcggcggcgtgatgccgattggcgccaccatcgcgactgaggaggtgttttcggttctgttcgacaatcccttcctgcataccaccacttttggcggtaatccgctggcttgtgctgccgcgctggcgaccattaacgtcctgctggagcaaaatctcccggcccaggcggaacaaaaaggcgatacgctcctggatggttttcgacaacttgcgcgtgaatatcccaatctggtacacgatgcgcgcggcaaaggtatgttgatggccattgaatttgtcgacaacgaaacgggctaccgttttgccagtgagatgttccgtcaacgcgtgctggtcgctggtacgctgaataatgcgaaaacaattcgtatcgagccaccgctcacgctaaccattgaactgtgcgaacaggtattgaaatcagcgcgtaatgcgctggcggcaatgcaggtgagcgttgaagaggtttaaaaacgatgccggatggcgctgtgcttatccggcctgttttccccgggtcgcggcctcttttttgaatcccatcacaatcaccacattccccttttcccttttacctcgcgacggctacagtagtaactcatccgaccacataacaataattttacatactggatacgcttatgagctacccgtcgctgttcgccccgctcgatctgggctttactactctcagaaaccgtgtgctgatgggatcgatgcacacgggtctggaggaacatcctgatggcgctgagcgcctggcggcattttatgccgagcgcgcgcgacacggcgtagcgttaatcgtcaccggcggtattgcgcccgttccctccggggtcgtgatgaccggcggcgcgatgctgaacgatgccagccagttaacgcctcaccgcgtggtgaccgatgccgtacatgcgcaaggcggtaaaatcgcgctgcaaattctgcacaccgggcgttacagctatcagccgcacctggtcgcgccgtcggcaattcaggcgccaatcaaccgctttatgccgcatgaactgacgcatgatgaaatcttgcagttaatcgacgacttcgcgcattgcgcgcaactggcgcgggaagcaggctacgacggcgtagaggtgatgggatcagagggctatctgattaatgaatttctcacgcggcgaactaaccatcgcgatgacgaatggggcggcgactatgccagccgtatgcgcttcgcggttgaggtagtacgcgcggtacgccagcgggtagggaacgactttattattatctatcgcctgtcgatgctcgatctggtggaaaatggcggcacgttcgacgaaacggtacaactggcgcaagccattgaagccgcaggcgcaagcctaattaataccggcattggctggcatgaggcgcgaatcccgaccatcgccacgccagtaccgcgtggcgcctttagctgggtgacgcggaaactcaaaggtcatgtgtcggttccgctgatcgcgaccaatcgcattaacgatccgcaggtcgccgagacgatcctgacgcgcggcgatgccgatatggtgtcgatggcgcgtcccttccttgccgatgccgaattcctgactaaagcgcaatccggacgcgcagatgagatcaacacctgtatcggctgtaatcaggcctgtctggatcggatcttcatcggcaaagtgacctcctgtctggtgaacccgcgcgcctgtcacgaaacccacatgccgataacgccggccatacgcaaaaagaacctggccgttgtcggcgcaggcccggcggggctggctttcgcgattaacgccgcgtcgcgcggccatcatgtcacgctgtttgacgctcagagtgaaattggcggtcagtttactatcgccaggcagatcccgggtaaagaggagttttacgaaacgctgcgctactaccgtcgaatgatcgatgttactggcgttacgctgaaactgaaccaacgggtgaacgcagaggatcttcagccgtttgacgaagcgatcctcgcttgtggaatagtaccgcgccgcccgccgatagacggtatcgatcatccaaaagcattgacctacctggaggtattgcgcgataaggcgccggttggtaagcgagtggcgatcatcggctgcggcgggatcggttttgacacggccatgtatctgagccagcacggcgaatccaccagccaaaatattgctgaattttgtacggaatggggaattgataccagcctgcaacaggcaggcggtctgcgcccggaaggcccgcgcctggcacgtagtccacggcaaatcgtcatgctgcaacgcaaaaccagcaagccgggcgaagggttaggtaaaaccaccggctggatccatcgcgcgacgttactggcgcgcggcgtgaagatgatcccggcggtcagttaccagaagatcgacgacgacggattacatctcttgatcggcggcgaaccgcagttgctggaagtggatcatgtggtgatctgcgccggacaggaacctcgccgcgagctggcggacccgttacgcgccgcaggtaaaacggtacatcttatcggcggatgcgatgtcgcgatggagctggatgcccgacgggcgattgcccagggcacccgactggcactggagatttaacgactttgcctgatggcgctacgcttatcgggcttacgccgtcataccggttttataggccggtatgacgcttgagcgccttatcgacggcgtccctgcttcaccgctttcaaaatgacaaatttattgttggttgctatcgtcgcgcaattaccgaaaatcttcttcagcttgtggaaatagtccagatggcggttcgccacaatatacagttcgccgttgattttcaggcagcggcgggcgtgatggaacatctcccaggcgatattgtccgtcagcgcatgtttctggtggaacggcggattgcagaacaccgcgttaaaacggaacggctccacgccggagagcgcgttgttgatcataaattcgcagcgttcgaatgcttccggcaggttcgtttctacattcaaacggctggaatctaccgccatcggcgattcatcgacaaatactacgttcgcctgcggatttttcgccagtaagctcaggccaatcaccccattgccgcagccgagatcgacaatctccccgtcgaggttttccggcaaatgctgcataaagaagcgcgcgccgatatccaatccggtacgagaaaacacattcgcgtggttgtgaatcgtccagcctgtatcttccagtttccagcttagcgtttgcggcgcgtcggccagttgcggatgactgaaggtacagttaatcaggcgcgctttcttccacgccagcgtcgtcgtggttgggcccagcactttttcaaacagttccagcgtagaggtatgaatatcacgcgctttcgcgccggcgataatacgcgtttgcgccgtaacgaccttacgcaaagcgcgtaactgctgttccagcaacgccagcgttttcggtaccttaatcaataccacgcccggcgcctgcgggtagtcagcggtactgtcgagaaacgttacgctggactccgcgatgccgttatggcgtaaattctctcgcgtacccagttcgcttaaatacgaatcgccaatactgtatggcgaatgctccgccagcgcacagcttagcgcgccaaacgtatcattcaggatcagcaccgggccgcgaatttccgtctcatccaactgttgcagcagatactcatcggccgcctcccacgccagaagcgggttaacatcatccgtttgcggaaaacgtttcagcgtcagtgaacggaaaccgtcgtctacgtggctcattaggcctcctgaatggtaaaattgcggcgttatccctgaaaagggtgcgtgagtatacactttttatcagcaacatggagctttgatgacctcactaacttaccttcaggggtatccggaacatctccttgcccaggtgcgcgccttaatcgccgagcagcgcctgggagcagtgctggaaaaacgttatcccggcgcgcatgattacgccactgacaaagcgctatatcactatactcaggaactgaaaagtcagtttctgcgcaatgcgccgcccattaataaagtgatgtatgacagcaagatccatgtgctgaaaaatgcgctgggactgcataccgctgtctcgcgcgttcagggcggcaagctcaaggcaaaggcggagatccgcgtcgccaccgtgtttcgtaacgccccggagccattcttacggatgattgtggttcacgagctggcgcacctgaaagagaaagatcataacaaagcgttttatcagctctgctgccatatggagccgcagtaccatcaactggagtttgatacgcgactgtggctgacgcatcaggcgctgtcggcacaataaattctgaaaatgccccttcccccgtatctttttaacggcgtgggcataaaatcggcgcgttcacatttcgctcattgcctgccgccacgtcaaggatgacgatctgtagagggtattttttatccaccgccaacggaaccgcgcaacgaccatgctctcacaatgtgcccgttttatccgccgcctctgttttacacgccgggccttaacagtggcgtgttttctgcttgtcgcagcaggcgtcgcgcttttctattccaactggcttatcgtcaacgcctcacagcatctgacatggaatgacattcagaccgttcccgcccgcaacgtcgggctggtgttaggcgccaaacccggcaatcggtattttacccggcggattaatactgccgccgcgttgtatcacgccggtaaagtgaagtggctgttagtcagcggcgataatggcaaaaaagagtacgatgaaccttcggcgatgcagcaggcgctgatggcgaaaggtgtgccggaggcggccattttttgtgattatgccggattctccacgctggactccgtggttcgcgcccggaaagtgtttggcgaaagccgcattacgattatctcgcaagcatttcataatcaacgggcgatctggctggcgcaacaatatggcattgacgctatcggcgttaacgcgccggatctgaataaaaggcacggaacctacacacgacttcgggaaaagctggcgcgggttagcgcagtgctggatgccaaaattttgcatcgtcagcctaaatatctgggcgctggcgtcactattggggctgatagcgcacacgggtgcccttctcgccagtaaaatgccagagtgcgtcgcagcgcactggcaagggcggaaaggcgtgctacattgacgaaaaatccctttctggagtccgctgacgtttatgatacgtttcgctgtaattgggactaactggatcacgcgccagtttgtcgacgccgcccatgaaaccggcaaattcaggctcgccgccgtttactcccgtagtcttgaacaggcgcagtctttcgcaaatgattatcccgtcgagcatctatttacctcgctggaagcgatggcgcaaagcgacgcgattgaggcggtttatatcgccagcccgaattccctgcatttctcccagacgcagcgctttttgcagcataaaaaacatgtcatgtgcgaaaagccgctggcttctaacctggcggaggttgatgccgctatcgcctgcgcgcgcgataatcagcgggtactgtttgaagcctttaaaaccgcctgcctgcccaatttcctgctgctgcgggaatcgttgccgaaaatcggcagaatgcataaagcattactaaattactgccagtactcttcacgttatcagcgctatctgaacggtgaaaatccgaatacgtttaatccggccttctccaatggttcgattatggatatcgggtattactgtctggcgtcggcgatcgcgctatggggcgagccgcgcagcgttcaggcgtcggcgaatttattggaaagcggagtagatgcgcacggcgtcgtggttatggattacggcgattttagcgtcacgctacagcattccaaagtcagcgactcggtactggccagtgaaattcagggcgagaggggatcgctggtcattgaaaagctgtcggaatgccagaaagtgtgttttgcgccgcgcggcgcgctgatgcaggatctgacccagcctcagcatattaataccatgctgtatgaagccggggcgtttgcccagcttattgaaaaccacgccgtggaacatccggggttgtcgctaagtcgcgccacggcaaaatggctgacagaaatacgccgtcaaaccggggtcatcttcccggcggacgatctgacccatccccttactgcgtaaaattatgtaaatcatatgttacaggtcattgactctacgcgtggcctgtcatactttgttacgcgcaaaggggagtaacttcattgccggtcgatcgtcattacgatgtgtgcaaaaccacatccggtcaccgggcagccataaaggaatgcgtcagcgtattcctttattgttgtaagtgagaccttgccgaatggcaaggtctatgcataaaagcaacggctaatgccattcggcgttagccgtttttttttttgcatagggagaaataatgaatactgttggtacgccattattatggggtggattcgcggttgttgtggtgataatgctatccatcgacctgttgttgcagggacgccgtggcgcacatgcgatgtcgatgaaacaagcggcaggatggtcaatcctgtgggtaacgctctcgctactgtttaacgccgctttctggtggtatctggctgaaacgcaagggcgcgaagttgctgacccgcaggcattggcgttccttaccggctatctgattgagaagtcgctggccgtagataacgtctttgtctggctgatgctgtttagctatttctccgtccctccggctctgcaacgccgggtgctggtgtatggggttcttggcgcgatcgtgttgcgtactatcatgattttcgccggtacctggcttatcactcagttcgaatggctgctgtatgtgttcggcgccttcctgctgtttaccggcgtaaaaatggcgctggcgaaggaagatgaatccggcattggcgaaaaaccgatggtgcgttggctgcgcgggcatctgcgcatgaccgatacgatcgagaacgagcactttttcgtacgtaaaaacggcctgctgtatgccacgccgctgctgctggtgctgattatggttgagttcagcgatgtgatcttcgccgttgacagtattccggcgatctttgcggtcaccaccgacccgttcatcgtactgacctctaacctgtttgccatcttaggactgcgcgcgatgtacttcctgctgtccggcgtggcggaacgcttctcgatgctgaaatatggtctggcggtcattctggtctttatcggcattaagatgctgatcgtcgacttctaccatattcctatcgcgatttcgctgggcgtagtgtttggtattctgaccattacgctggtgattaacgcctgggttaaccatcagcgcgataagaaactacgagcgcaataatcttttatcggggtaaacctgccccgtcaaaaacgcccgacagcgcacacctgtcgggcgtttttgtttaacatgtcacaatactgttaatataaagttataaaacatgatcacagcaaaaaatccaggatatttcgcttcccgaaccttcaactttccttatactcaaccaggcaaacactttgttacatcctgaaagatgcgccgtaagagcgtgcaggggatgaccagcaacacaatacaaggaatatgaaatggctacgcaacgagcatcagggctactgcagcgtttagcgcaaggcagtctggttaaacaaattttagtgggtctggtactggggattttactggcatggatttctaagcctgcggcagaagcggttggcttgcttggcaccctgttcgtcggcgccttaaaagcggtcgcccccgttctggtgctgatgctggtaatggcctcgatcgccaaccaccagcacggccaaaaaaccaatattcgccctattctctttctttacctgctaggcaccttttcagccgcgctggcggccgttgtgttcagcttcgccttcccttcaacgctgcatctgtccagtagcgcccaggatatcgtgccgccgtccggcattgtagaagtcttgcgcggtctgctgatgagcatggtgtcgaaccccatcgacgcgctgctgaacgctaactatatcgggattctggtatgggccgtcggtctgggatttgccctgcgtcatggtaatgaaaccaccaaaaacctcgtgaacgatatgtctaacgccgtgacctttatggtgaaactggtgatccgtttcgcgccagtcggtatttttggtctggtttcatcaacgcttgcaaccaccggcttctccaccctgtggggctatgcgcacctgctggtcgtcttgattggctgtatgctgctggtcgcgctggtggtcaacccgctgttggtattctggaaaattcgtcgcaacccttatccgctggtgttcgcctgcctgcgtgaaagcggcgtttatgccttctttacccgcagctctgccgccaatattccagtgaatatggcgctgtgcgaaaagctgaatctggacagggatacttactccgtttccattccgctgggcgccactatcaatatggccggcgcggcaattaccattacggttctgacgttggcggcagtccatacgttaggcgtcccggtggatctgcctacagcgctgctgctgagcgtggtggcctcgctgtgtgcttgcggcgcctccggcgtggcaggcggttcattgctgctgatcccgctggcgtgcaacatgtttggcatcccgaacgatatcgcgatgcaggtagtagcggtcggctttattatcggcgtattgcaggattcgtgtgaaacggcgctgaactcgtctaccgatgttctgttcactgcggcagcctgccaggcagaggacgaacgtctggcgaataacgccttgcgtagctaagtgattatcgatgccggatggcgtatgccatccggcgtaacgatagatctgaatctcccaatccataggctgtgatggaaagcgaattgatgttcacgcgcaacatcctcgcgtaacgttatatgtagatggcgtctgccgcggcgctcggtcagcgtaaagtataaagtgtcagcctgtgtaaatcctctcgccaccctcccttgcgataagcaaaatcaaagctcaacgacgcgtaatttctataacggacttcgttgacctttgttacaattagatgcattttgaatttttgtgtgttagtgcttgcttacttcacaacttaacaaggaatagttcaggccgcgaatttgccgtttccgcaacgctgataaaaactccaactctgttgcggcagtgcaaacctcagatcaccggcgtgacgttaaccgattctccaggaatactgaatggaactactgactcaattgctgaatgccctgtgggctcaggactttgaaacactggccaatccttccatgattggcatgttatattttgtgttatttatgattttgtttctggaaaatgggctgctccctgccgcctttttgcctggcgacagcctgttgatcctggtcggcgtgctgatcgccaaaggcgcgatgggttatccacaaaccattttgctgcttaccgtcgcggccagcctgggttgctgggtcagctatattcagggccgctggctggggaatacccgcaccgtgcaaaactggctctctcatctccccgcacattatcatcaacgcgcccatcaccttttccataaacacggcctgtcggcactattgataggccgttttatcgcgtttgtcagaacgctgctgcccaccattgccggcatatccggtctgaataacgcgcgctttcagttcttcaactggatgagcggcttgttgtgggtgcttatcctgacgtcgctgggctatctgctgggcaaaacgcccgtctttatgaagtatgaagatcagttaatgtcatgcctgatgctgctgcccgtggtgctgctcttttttggcctggcgggttcactggtcatgctgtggaaaaagaagtatgggagccggggataacttatgcttaaaccacgcataactgcccgacaactcatttggatcagcgcttttctactgatgctgaccatactcatgatgacgtggtcaacgctgcgtcagcaagagtcgacgctggccattcgcgcggttaaccagggcgccagtatgccagacggcttctcagttctgcatcatctggatgcgaacggcattcattttaaaagcattacgcctaaaaatgacatgttgctcattaccttcgattcccctgcgcaaagcgccgcagcaaaaacagtgcttgatcaaacgttaccacacggttatgtcgtcgctcagcaggacgatgacaacgaaacggtacagtggctgtcccgcttacgggaaagctcacaccgctttggctaatctccaggaatccgaatcatatcactcactttggtgatttcattgtttaatgactatgattaataaagcggtgtttaacccaccgcgttattatcgggatcaccgccccggacaacgggtccgaacataagggaaagttcaggaatgaaataccgcatcgctttggctatcacgctttttacacttagcgccggtagctacgctaattcgctttgtcaggaaaaagagcaggatatacaaaaggaaattagctacgctgaaaagcacaacaatcagcgccgtattgagggtctgaacaaggcgctcagcgaagtacgcgccaattgtactgacagcaagctgcgcgccgagcatcagaaaaagatcgctgagcaaaaagaagaggtagccgaacgccaacgtgatttagccgaggcaaaagcaaaaggcgatgcggataaaatagacaaacgtgaacgtaagctggccgaggctcaggatgagctaaaaaaacttgaggccagagactactaaattaacgccgaatgtaaatactcactcacctggagaaaactatgtcgaaagataacactacggaacatctgcgcgctgagttgaaatccctgaccgatacgcttgaagaagtgctgagctcttcgggcgaaaagtcgaaagaagagttgagtaagattcgtagcaaagccgagcgcgcgctgaaagagagccgttaccgcctgggcgaaacgggtgatgtgattgccaaacagactcgcgtcgccgccgcccgcgccgatgattatgtgcgcgaaaatccctggacaggcgtaggcattggcgccgctgtcggtctggtgttgggcgtactgctgacgcgtcgttaattatggcggactctcgacaggcacaaggaccaggcaaaagcgtactgggtatcgggcagcggattgtcaccattatcgttgagatggtggaaacccggctgcgactggcggtagtagaactggaagaagagaaagcgaacctctttcagcttttgctgatggtaggtcttaccatgctcttcgcggcgtttggcttaatgagcctgatggttctggtcatctgggctatcgatcctcagtaccgtttgaacgcgatgatcgctaccacagttgtgctgttagtgcttgcgctaatcggcggcatctggactttgcgcaaagcgcgtcagtccacgctattgcgccatacgcggcacgaactggctaacgatcggcaaattctggaggacgatcagtcgtgagcagcaaaggcgaacgcgaaaaacgtaaagcgctgcttctcagtcagatccagcagcaacggctggatctgtccgccagccgtcgcgactggctggagaccaccggcgcgtacgatcgcggctggaatacggtgttaagcctgcgctcctgggcgctggtcggtagcagcgtaatggccatctggaccatccgtcatcctaatatgttggtacgctgggcgaaacgcggcctgggtatctggagcgcctggcgcctggtaaaaactaccctccgtcaacaacagctccgcggttaatatcttttcttttatagcatcgcgccatcaggttatcacctggtggcgcgatacttttatgcatatcgtctctttagcaatcactcaaattttttgaaaaaatttggcaattttccttgctaacaattcctgcacgccacgtttatgattctctccagcgataacaatgatgcgccaaaccgcgtcattgctcatgaaaatagcagcagccgccgaatcggccccctggagaataaaatgaaaaaattagaagatgttggtgtactgatagcgcgtattttaatgccagttctgtttattaccgcaggatggggaaaaattagcggctatgcgggcacacagcagtatatggaagcgatgggcgtaccaggattcctgctgccgctcaccatactgcttgagttcggcggcggtctggcgattctgctggggttcctcacccgcaccactgcgcttttcaccgctggttttacgttgctgacggcattgatcttccatagcaattttgcagaaggtgtaaactcgctgatgtttatgaaaaacctgaccattgccggcggattcttattactggcgttaaccgggcctggcgcgttcagccttgaccgtctgctgaataaaaagtggtaagcaatctatactcaattaaaaaagcgagggaatagcgcctcgcttttgtcatctgaaggagagagacatgggacaactgatcgatggcgtctggcacgatacctggtatgacaccaaatcttccggggggaaatttcagcgttcagcgtcggctttccgcaactggcttaccgctgacggcgcgcccggaccttccggcgaaggcggattcgccgcagaaaaagatcgttaccatctgtacgtttcccttgcctgcccctgggcgcatcgcacgctcattttccgtaaactgaaaggtctggagccgtttattccggtttccgtcgtgaatccattgatgctggaaaacggctggacgtttgatgatacttttccggcggccaccggcgataccctctatcagcatgaatttctctaccagttgtatctgcacgccgatccacactacagcggccgcgtcaccgtaccggtcttatgggataaaaaaaatcatactatcgtcagcaacgagtccgccgaaatcattcgtatgtttaactccgccttcgatgggctgggcgctaaagccggggattactatccccccgcgctgcaaagcaaaattgacgagttaaacggctggatttatgacaacgttaataacggcgtttataaagcaggcttcgccaccagccagcaagcgtatgatgaagcggtagacaaggtatttactgcgctggcgcgcctggaacagattctcggacagcaccgctatctgacgggcgaccagttgaccgaggcggatatccgcttatggacgaccctggtacgctttgatccggtttacgtgactcatttcaaatgcgacaaataccgaatcagcgactacctgaatctgtacggtttcctgcgcgatatctatcaaatatcgggcattgctgaaactgttaatatggaccatattcgtcaccactatttccgtagccataaaacgattaaccccacgggtatcatttctgtcggaccgtggcaggatctgctcgaacctcacgggcgcgacgtgcgctttggctaatttcaggcgtcctccgggacgccttattaataaataccacaaatatttaccagcatttcattcgcggctattcttagtttgattactttaaaaacaagtgattgaaccattattgaggcgaaaatggattggtatttaaaggttttaaaaaattatctgggatttggcggccgcgcgcgacgcaaagagtactggatgtttattctggtcaatatcatctttacctttgtgttgggcctgctggacgccatgcttggctggcaacgcgccgggggtgaaggcgttctgaccaccatttacggcgttctgatctttttaccgtggtgggccgtgcagttccgtcgtctgcatgacactgaccgctccgcatggtggctactgttgctacttatccccattatcggctggcttatcatcatcgcgttcaactgccagaatggtacgccgggcgacaaccgcttcggccccgatccgaaacgtttttcctgatggcggcgcggcgccgcttttaaagcgccgcgcgctatttattttccggcgaatagcttaggtatttcccgcaggcaccaggcttttgcctcccccatactgtcgcgccgccaggccataataatatcgatttcgctggtcgattccgggctgaccacgcgtagccgcccttcggcaatatcctgttccaccatcgaatatggcatggtcgcgacgccaagcccggccagcagcgcctgacgtttatcttcaatcgtgcttaccgtcagacgtggctgcttatccagcagttgcaccgttaataccggccgctcgcgcgcggtatccgctaccgctacgccgcggtatttaacccgcgtcacttccgaaagcggctccggctcctgatgaatagggtggtcaggcgcggcgacatacacattcattaacgtatacaacttacgggagttaatttccgacgacgatcgaaaatgcatatccggagcgataacgatatccgcccgtccctgctcaagccgctcccatgcgccagccagtacttcggtaatcaatgaaagctgcgtattggctttagcggccagccggtcgatcagtggaaaaaaagcaggcgtcggtaccagagcttcagtgactagcgtcagatgcgtttcccaaccgcgggccaacgcttcagcatccgtcgttaacttgtctgccgcttccagcaatacccgcccgcgttccagcagcatacgtccgacgttggtgaattttgtacgatggccggagcgatcgaacagtacaacgtccaactcttcttccagcttctgcatggtgtaactcagcgcggagggcacacgccccaactcatcagccgctgcggcaaaactgccccggcggtcaatggcgtccatcacacgcaatgcttcaagcgtcagcgctctctctttagccataacgttctcattcaggaaatttgaacataccgggcagaatatctggctaacaatgcagcgtccagccccttaacataaaaggaagtaaagagaggttaataacgatgattacgacccgaaccgccaaacaatgtggacaggcagactacggatggctacaggcccgctataccttctcctttggacactatttcgaccctacactgctaggctacgcgtcgttgcgcgtactgaaccaggaagtgctggcgccgggcgcctcttttcagcctcgaacttacccaaaggtggatattttaaacctgattctggacggcgaagcggaataccgcgacagcgacggcaaccatgtacaggctaaagcgggcgaagcgttactgctcgccgcgcagccgggcattagctacagcgaacataatatcagcaaagttaagccgttaacccgaatgcaactgtggcttgacgcctgtcctgaacgggaaaacacgctggtacaaaaaatcccactcctggcggcgcaacaacagcttcttgcctcgcccgacggtgagcaaaacagcttacaactgcgccaacaggtctgggtacatcatattacgctggagaaaggcgaatcgcttaatttccagcttcacgggccgcgcgcctatttgcagtcgattcacggtacgttccacgcgatgacgcacaacgaagaacgcgaggcgttaacctgcggagatggcgcatttattcgtgatgaacctaacattacgctggttgccgatacgccgctgcgcgcattactggtagatttaccggtgtagccagccagaaaaggagtcgcaagatgagcaaaaaatcggcgaagaaacgtcagcccgtggtaaaacctgccgtacaggaggcgatgagcgccgctgtgccgctgggctatgaagagatgctaaccgaactggaagccatcgtggcggacgccgaagcccggctggcagaagaagaggccgcagcctgaaatcatgccggatggcggcgcaagcgcccgatccggctgataacgggtagacccgataagcgcagcgccatcgggcaacacgctgccccgacgtcatgccggggcgttattattaatgcgctttactggccataatctcgatgatctgcttgtcggtctgctgcattgagcgacacgccagcgaacacaaattcgaaatagattgttcgacattgtgcgccacaatcccttcgtttccggtcaccgccgtatcatccaacgccatcagtacggctttccacgccgccgacgcgctggtagagactttcatcgcgcagctattcgacgcgccatcgcaaatcatcccgctgacatcaccaatcatactgctgatagccattgcgatagtgtcgtaacgaccatctatcagccacgccatacccgctgccgcgcccatcgccgccgtagttgccgcgcacagcgccgacaaacgcggaagctgatggtgaatatagatagcgctcaaatgcgataacattagcgcgcgcgccaggcgctcgtcatcggcgccgacatgttcagcaaccaccatgactggcaccgtggcggtaatcccctggttgccggagccggagttgctcatcgcgggcaacgtggcaccgcccattctggcgtctgacgccgcgctggtacggatcaaaatcgccgtggagagatctttcgccagcagaccacgatcgcactgtttggccagcgtcgaaccgatatgcagcccccaggaaccacgcagtccctcctgcgacaacgcgccgtttagcctggccgcatcgagaataaagcggatagcgtcaaagggcaccgcattcacaaacgccaggatctcttccagcgaggtatgagacagcactcccagtggcgaggttttttcttcttcctgcgcattatcggcctgggtaaataccacacccttgtcggtttctatccgcacaatatttgtatgatcgccgacgatcgtgacacatgcccagctatcgccgctatacactttcgcccgtgaaaacagaatatcgttacatggctcctgcaacatcaccgcgacatgtccagcggccagcatcgcttttgcatcggcaacggctttagcggaagcgtcttttaacacctccaacccggctttcgcatcaccgcccaacgcgcccaacgccgcggcgatcggtagccctaccattcccgttcctggaacggtaacgcccataccatttttcatcagattgggcgaaacccacgcgtcaatgcgttcaactgtgccgttaagttcagccgccgccgccgctgccgccagcgccagtgaaattggctcagtacaccccagcgccggttttacttcttcctgtacggccagaataaaactttgccacaatggatttattttagattcaaacataacaacaaccttaatctcaggtatatcaagagaatgccaggaacggagaaacgcatagcagcagaccggtaataataatcaggtacaacgaagcgcctttatatttgtgcaatgcgggaaccttgtagaccaaccatgccggaattaaacagcccaccataccgaagatagggctacaaatagaggtgaagctcagtaccggcgcgttgagcacaatggcgctccaggccagcaaaatagcgaaaatcataatgccgcgctgtaccagattttccttaatcttctcggcgggcattttacggcgcaggatattcatcacaatgccttgcgtcgcttcgcggaatcctaaataaacgccaaagaaggcggtcatgacggcaaagatgttcagaattacgctaaccactttgacccagccagcgccatcgccgctaataaattgcgcggcgatcgccagggcggaaatattctgctcgtaggctttcaccgcttcgtcatgccccatcgccagggtgaaggaaaccgcatagaaaaatacggtaacgaacaggatgccaaacgcaatattcatggcacgcagcgctttatggcgtgcgacctcaatagatttttcgcgtgaacggtaagagatcaccattgggcttaacgtctggataaataaaatcgaggtcagcgtaaatggcagggtaataatggcgtttttaatcagcagggccatcggcggcagcgcgccaatgttatacagatgccacatacccaccatagagacgcccagcgccgccactaccagtagcttggtcagcaccatgccagtggagattttgaacagtaatttttcaccgcgtgaggaaatcgccaccaggatgcagatcagcaccagaccataaaatggactatcggaaagcaatccttccgttacgccgaaagtatgcagataagaggcgctgtcgttagtaatcgccgtagaatagacgaacatccagatgacgagcatcacaaagtacagcgcgcctaataaaataccccagtttttgcccagatagccgctgatcacgctggggtagtctttacattccggggattccgccagcgtattaataaacagccgctggaacaggtacatggccggatagccaataatagaagagagtaaaaagacccaaagtcccatcaggccaacctggacaggaagaaaaacgatccctgcgccaatcgccatcccgatactcataatgacccaaccggtgtcggtactatcaaatttgatggcttcacgccattcgctttcagtcatccctgcccgacgcgccggggctgatgcgtcgaggattacgctggtattacttgccgattccataaaattctcgctcaatgtgtaggtagaggttttttttatttttcgtgccgcagcaaggcgatatgcagaacgtgaggtgcaggtactttcttgtaataagaaaatcatacgcgcacgataagagaaaaacttaccaataaaacgcctgcatttcttgtgggttaagaattcttttctatttactattggtttaatgttgttattttctctatttgacgcgtatcacaacaaaaaagggcgcactttggtgcgcccttttctcaacttctgtcttctacgttatcccatagcctgctcactctgcgcctgtcgggcctatccacaaacgactttaatcgccagaccgccgcgcgacgtctcgcgatatttgtcgttcatgtctttacccgtttcgtacatggtttcgattactttatcgagcgaaacccgcggttcagaggtacggcgtagcgccattcgcgccgcatttaccgctttaacggcgttaatcgcattacgttcaatacaagggatttgtacctgacccgccaccgggtcacaggtgaggccaaggttatgctccatcgcaatttccgccgcaatacagacctgcgccgggctgccgcccagcagttctgtcagccccgccgccgccatcgaacacgcgacgccaacctcgccctgacaccccacttccgcgccggatatcgaggcgttcatcttgtacagcataccaatcgcccccgccgacagcagataacgggcgatagagttggcattgaccggacgacggaatttgtcgtaataggccagcaccgcaggaataatgccgcacgcgccgttggtcggcgcggtgaccactcgcccgcccgccgcgttctcttcgctcacggccagggcgaacatgttaatccagtcaataacgttcatcggatcgcgggagagattatcgctggagaccagcagacgccgtaacgctaccgcgcggcgtggaacgttcagcggccccggcagcacgccctcagtattcatgccacgttcaattccggtcgccatcacctgccagatgcgggcaaagccagcgtcaatctgctctttgctccgcaacgccagttcattttgcatcatcaggccggaaaccgagagcccctgtctttcacacagcgtcaacagttcgctggcggaatgaaaatcatacggcaccgatttttctacgtcgtgcgactgaccaaaacgctcctcttcgacaataaagccgccgccaatagagtaatacgttttgtgtaaaagcggcgcttgtccgttccaggcggtaatacgcataccgttttcatggcgcgccagggtttcagcgtgaaagaaaatactgtcggcgacgggaaaatccaccacatgcgcgccacccgccaccgataaacggctgctgcgggcaacctcctggataaacgccggaatgctatcaatattgacatcctgcggcgtattgcccgccaggcccataatgacggcggtatcggtcgcgtggcctttgcccgtcagcgatagcgatccgtaaagatcaaccgtgatgcgcgtcgttcgcggcaggtcgccgctgtcgatcagccgatcgataaaacattttcctgcattcattggccctacggtatgggagcttgaaggtccaatgccaatcttaaaaatatcaaatgcgctaatcatatctccccctaagattaccgttcagcgaagatccgtcgcggggcgatccacacgatcgccccgttcacgttacatcgcctgagtaaaggtgcgcgaaataacgtcctgttgctgttcacgcgtcagcgcattgaagcgcacggcatagccggaaacgcggatcgtcaggttcgggtagttttccggatgttcaatcgcatccagcaacatttcacggttcatgacattgacgttcagatgctgcccgccttctacctgtgcttcatgatggaaatagccgtccagcaggccgacaagattggttttccgcaccgcatcttctttcccgagcgccgcaggcacaatcgagaaggtgtacgaaataccgtctttggcgtaggtaaacggcagtttcgccaccgacgtcagcgaggccaccgcccctttgcggtcacgaccatgcatcgggttcgcccccggcgcgaacggcgttccggcgcggcgtccatccggcgtattgccggtcttctgcccgtacacgacgttcgaggtgatggtcaaaatggactgcgtcggcaccgcattgcgatacgtcggcaacacgctaattttttgcataaagcgtttcaccaggtcgcaggcgatgctgtccacgcgctcatcgttgttgccgtactgcggatactcgccttcaatagcaaagtcgatggcaaggccgttttcgtcgcggatcggcttcacctgagcgtacctgatggcggacagggaatccgccgccaccgacagtccggcgatgccgcacgccatcgtccgatacacatcacggtcgtgcagcgccatcagcgaagcttcatagctgtacttatcgtgcatgtagtgaatgatgttcagcgcgctaatgtactgcaccgccagccagtccataaaatggtcgagactctccattaccgcgtcataatccagcacctcatccgttaacggcgcggttttcggcccgacctggattttcagtttctcatcaacgccgccattgatagcgtacagcaacgttttggcaaggttggcgcgcgcgccgaagaactgcatctgcttaccgatgaccatcgggctgacgcaacaagcgatggcgtaatcgtcgctgttaaagtcggtacgcattaaatcgtcgttttcatactgcaaagatgaggtcacgatggagacctgcgcagcatatttcttgaatgccaccggcaacgcttctgaccacagtatggtcaggttcggctccggcgctggccccatcgtgtgcagggtatgcagataacggaaggagttcttcgtcaccagcgtgcggccatcaagccccatcccgccaataacttcggtggcccagatcggatcgccggaaaagagcgaatcaaattccggcgtgcgcaggaaacgcaccatgcggatcttcatgatgaaatggtcgatcagttcctgcgcctgctgctctgtcagaaggcccgcgttgaaatcgcgctcaatgtagatatcaaggaacgaggcggttcttcccagcgacattgcaccgccattttgcgattttaccgccgccagataagcgaagtagagccactgtaccgcttcctgcgcgttccgcgccgggcgggagatatcgtagccgtatttcgccgccatctcctgcatttgcagcagcgcgcgacgatgctccgccaactcctcacgcaggcgaatcgtcgcctcaagattctgtccctgctccagattcgactgcaggtcggcgaattgcagctcgcgttcgcgcaccagataacggatgccatacagcgcgacgcggcgataatcgccaataatgcgcccgcgaccataaccatccggcaaaccggttaatacgccggatttacggcagcgcagcatatccggcgagtaaacatcgaatacgccctgattatgggttttccgcaggtcggtaaaggtatattcaaaatcggcgtccatttcgcggccataagcgtggaatgaacttttgatcatgttaacgccgccaaacggatgcaaagcgcgtttaagcggcttatccgtttgtaaaccgacgattttttccagctctttttcaatataccccgcatcgtgcgcggtaatcgtcgtcgcgatgttggtatcgaaatccaccggcgcatgggtcgcgttctcgatacgtattcccgccatcaccttttcccacagcgccgtggtcgctggcgtcgcgtcggcgagaaaagattcatccccctcatagggcgtatagttatgctgaataaaatcacggacattaatttcttctttccagtccgtacctttaaaatcacgccatgcttcggcatacagcatatcgctggtatcgatatttaccttcatgaaaaataatctctctacagaacagccgttaagttatgcaaattccactggtgctttcacgttgcctaaatgaatggcatcaagggcaatcattttctcttcattcgtgggaataacagcgcaaataacctgagaagggttagcggaaataatgcgctcgccgtgagaattcggctgcttattcatttcaacgtctaacgtaagccccagtacgcccagatgttcaatgaccaactggcgaattaatactgaattttcaccaataccaccggtaaaaataatgccatccaaccgatgtaacgatgccgcgtgtccggcaatatgacgggcgatacggtgaacaaacgtttttatcgctaaccgggcgcgctcatgtccttcgtgccaggctttttccaggactctaaggtcggatgacaaaccggagatgccgagcaaaccggactctttattcaccactcgctccagatcgctcaacgtctgcccggtttctttggctatccacgccatcgcgccgaaatcaacgtcgccgctgcgagtccccatcatcagcccctcaagcggcgtcatccccattgaagtatccacgctctgaccattgcgtaccgcgcagatagacgccccattgcccagatgcgcgacaatcagacccgagtctttttcatcgaggtcaagcagttcatacgcgcgccgcgaaacatagcgatgcgacgtaccgtgaaagccgtagcgacgcacgcccaggctggaaaaatactcccacggcaatccgtataaataggcttccggcgccagcgtctggtggaaactggtatcaaataccgccacctgacgcacggccgggaaaagatgccgcgccgcgtcaatgccgcttaaattagcgtaattatgcagcggcgctaaaggcgatacccgacgaatattatcgataatctcatcggtaataatgacggactgcgtaaataactctccaccgtgcgcgatacggtgaccaattaatgccacgctatccgttaaatcacgtttttccagctcaaaggcaatggcttttaacgcgtcctcataattagagtgtgcgaggtttatcggcttatcgccattaatagataaaaaggcgttttcagtattcattccatctgctattcccgccattaaaacatcacaggtagcgacatccagtacagagaatttgatagaagatgatccgcaattaatgaccagaacgaccggaaattcattcatgtagtgcctccgtcgatgtcagcctgcgtccgcgccctggggcggacgcaggctaaacgtgaggattagaacaatttgtagacaatattcaggatggtcagcagaccaatcagggtgacgaacacgttatccagacgaccacggtacttcgccagcgacggcgctttacgaatggcgtacatcggcagcaggcataacagcgaggcgataatcggcgcgcccatcgcttcaatcaggtccagaatgttcgggtttgcgtaagctacgacccaggtagaccccataatgaagatcatgctgatggtgttaagcttgcccatagagactttggttttatcgcctttataaccaaatttcagcaccaggccgttcagcccttccagcgtccccaggtagtggccgaagaaagatttgaaaatagcaaccagcgcgatgatagacgcgccatactccagcaccgttgcaaaagtagattttgtccccgacaaagaggcgaaatggttggccaggtaggaaagtaccggaatgttctgcgctttcgcatccgccatgttctgcggggagagcgtaaacaggcagctaaaggcgaagaacatcaccacggcgaccatcagcatactggcgcgcgagatgatctgtgaacatttacgctcggtaaattcgcggccaaactctttctcatactcttcacgcttagacaccacgaaggaagagacgatgggcgaaaagttaaaggagaacaccatgatagagatgcccagccacaccgtaaccagtatgccatcgtgcccggtcagcgcgatattactgagatcaacctgatcgataaccgccgagttccagtaaggaatcagcgataatgagattagtaccagactggcgataaacggccataccaggtaactcatcaccttaaccatcagatctttaccaaaccagatcacaaaggccatcagcagcagcaagaacagcgccacgaaaccgcgattcaacgctggcatctgcagctggttttcccaaaacgtcatgaacgtgttagtaatggtgacgccataaatccacagcagcggacaaatcgcaaagaagtaaaggaacgtgataactaccccgcccgttttaccaaagtgctcttcgaccgtttccgtaatattgccggacggattagatccggataaacacagacgcgccagcgcccggtgacaatagaacgcaatggggtaagctaaaaccagcatcagaagaatggggataagcccgccaaacccggcgcggatagggaaaaacagcaccccggcgccgatggcggtaccaaataaacccagcgtccacgtcgtgtccgatttacgccatgacgactgttttgcctggctggatacaatgctatcagtagtactcatatcctatcctcacgaaaagattaagcgtcaactaaacccgtaatttgtgatacccgagaaagatcgatattgccgccagaaataatactgaccgtttttctgttctgaatatggctatctaatttcccacttaatagtgcggcgcaagccagagcgccagcgccttcagtaataaccttattgcgctgaattaaagcgatcatgctgttacgaatttcatcttcgctaaccaggacaatgtcatcgactaattcacgaacgatttcataggttaaattacccgggcgggagacatcacaaccatccgccagggtgccggtcgttcggtgcgtggttatttcgccagtgtaataagacgccgccataccgtgaacattttcggcctgtacgccgataactttaatggtcgggttaatcgatttaatcgcaatggcaatacctgcaattaaaccgccgccgccaataggcacgatgacattatcgacatcgtacagatcttccataatttccagaccaatagtgccctgtccggcaatgacttttggatcgtcgtaaggcggaataaaaatgcggccttcggtttcgacaatttcactcaccttagcgatggtgtcattgaagttgtcaccgtggagcaccacttccgccgaataatcacaggtggccgccacttttgactttggcgcgcccttcggcatcacgactttgccgtcaatacccagcattgcgcaagaaagagaaacgccctgtgcatgattacctgcggaacaggccacgacgcctttacgtttttccgcctccgttaacgagctaagtttgttaaaagcgccacgaattttaaatgaacccgtacgctgcatattttcaaacttgagaaatatttcgcctttgcaacgttcactaaaatagttagagcgaggcattcccgttttatatatcttccccgccagtctttttttcgcttcgaggatatcttcaattgcaaccgggagatcgtatgtaatgtgcattataacctcttaacctgggtattaaaaataagttaccgttgcccactgttcaaaagaaacaggtgacgtcaatttcgctaaatatgtttattccatatcattcaatttctattaactgcctgcgtctgcatccattatatgatgaatattgtttagccaattctactaatactgaagcggcttttttgatacgataatttttagaccataccgccgcataacgtgcgacgggtaacgtgtcttgtatgggtatcgtgataaattgattagagccaaaaggcgtggtcatatcgcagggaataacagttaagaaatcagcattgagaacaagattatatattgtgacgacggaatctgttttaacaatgttttcgatgctgatgccatttcgttgtagagtggtgagtaattcgctgtagtagcccatattcgtttgcggcaacacccactgttcgtcttttaacgattccagtgtgatggtgccggtgcatgttcgggacttgctggctaccaggacaaactctgattcaaacagcggctcgacatgcagatcctgtagctgcatttcattactgagcgtaccgatagcaaagtccagccgcccgtcgcgcagggccggcagaaatgaagagagctgggcttcgtacatggatacctgcgcttttggaaagacctctttgaacttatgaatcatatcggacatgaaggtaaagccaatcagcgaaggaaagccaaacgagacgtcgacaacggtattgcacgtcatactgttcatctcgttgatcatgtttttcatttcgcgggtgatagattcagaccaggaaagcagtacctgtcccgcttcggtcaacgtaacgccggtatttttacgtacaattagctcaacgccaaaataggcctcaacatcgctaatgattttactgacggcgggttgggttaaccctaacgattttgcggcagaaccgatagaaccacttctaatgacttcctgaaagaccaccaaatgctgtgttttagggagaacaagagtattcatatctaccgctctgaaataacattgtgaacggcaggaagtgtagcaaattaaatcttaaaggttatgtgcgaccactcacaaattaacttaccacaatttttacatggtttttattaaataaagaaaacctgatatttcaataggttacaaaaataaagcagtaacttagcctgatttcaatcaaaaaacaggggcgggataacgatatattatggcgataaccagcctattttatctcctatttttgatatcccatgaagacgatatttcaatcaattacgggacattttatcgacaattccagcgttaaatttaaaacgtaatttctcaaatttaagtataaaccgaaggtaaatgcgcttaaaaaccgttacgcgtcacatttttttaccttatttgtttgcaaagaaacatttaataaaattttaaccaaaatatttcatacatttaattttcatttaaaacaaataatttacaccgctttcttgctgtttttcaggatgtaattttgtgaaagaaatcgattgcttttcacttcaactaaaaatagcgcaatacatagcgttttgtgtttctcatcacaaaaacgaataatattatgtcaccacggctgtcaattaattgccggatggtgacgctggcgtcttctgcaacctctatacccttcaccggcctgataagcaaaaacccgccgaagcggattttatgaagaggtgaaactgaccgataagccgctttctttcgggtatagcgtcgtggacagtcattcatcctgtcgccctgtaaaagcaaaaacccgccagcttacactgacggggtttatgaagagatgaaactgaccgataagccgctttctttcgggtatagcgtcgtggacagtcattcatcctgccgccctgtaaaagcaaaaacccgccagcttacactgacgggttttatgaagaggtgaaactgaccgataagccgctttctttcgggtatagcgtcgtggacagtcattcatcctgccgccctgtaaaagcaaaaacccgccagcttacactgacgggttttatgaagagatgatactgaccgataagccgctttcttttgggtatagcgtcgtggacagtcattcatcctgtcgcccggtaaaagcaaaaacccgccagcttacactgacgggttttatgaagagatgatactgaccgataagccgctttcttttggacatagcgtcgtggacagtcattcatcctgccgccctgtaaaagcaaaaacccgccgaagcgggttttatgaagaggtgaaactgaccgataagccgctttcttttggatatagcgtcgtggacagtcattcatcctgccgccctgtaaaagcaaaaacccgccgaagcgggttttatgaagaagtgaaactgaccgataagccgggttctgtcgtggacagtcattcatctaggccagcaatcgctcactggctcaagcagcctacccgggttcagtacgggccgtaccttatgaacccctatttggccttgctccgggtggagtttaccgtgccacggactgttaccagccgcgcggtgcgctcttaccgcaccctttcacccttacctgatcccacttacgtgggccatcggcggtttgctctctgttgcactggtcgtgggtttcccccccaggcgttacctggcaccctgccctatggagcccggactttcctcccctccgcccgtctccccgaaaggacgacgacgaagcggcgactgtctggtcagcttcggcgcgcagtatagtgggttcgcgcgactttgtcaccctgcgctgcgcattcctatcgccagagcggcagcaacatttctggatgcccgataaatattgtcaaaagcgccccgaaaagcctcctccagcgtcacgatgcgcgtgagtacgctaaagacagcgtcgatgccataatgatgtactatccctacatcgtgcgtcaggctgccggcaatgccaattactggcttatgatattttttcgccacatttgcgacgccaatcggcactttaccgcgaatactttggctatcaatccgcccttctcccgtcaccaccagcgtacagtcgtggatatgctcctccaggttcagtgccgccgtgacaatttcgatcccgctgcgtaattccgcaccgagaaaagccattaacgccgcccccataccgcctgccgcgcctgcgccgggtgccgtctttacgtcgacattcagcgatttttttatgatgtcggcatagtgagcaagatttctgtccagctcaacaatgttctcttcggtcgcgcctttctgcggcccaaaaattcgtgatgcgccgttgtcgccgatcagaggattagagacatcgcaagcgacacgaatcgcgcagagttttaaacggggatcgagctctgaaatatcaatgtcgcttagacaatgaaggcttccgccaccgtaaccgatatccgcgccgtttgcatcgcgcagttttgcgcctaacgcctgcatcatccctgcgccgccgtcatttgtcgcgctgccgccaatgccgataatgatattgcttgcgccgctttccagcgcctgcaatatcagctcccccgttccccgcgaggttgtaatcaaagggttgcgtttttctggcggaaccagcgccagtccgctggccgccgccatttcaataaacgcggttttaccatccccggacattccccagcaggctttcactttttcacccaacggcccggtcacccatgcggcgcgttcaacgccctgcgtcgcggcaatcatggcttcgaccgttccttcgccgccatcggcaaccggaacagagacatattgcgcatcggggaaaatttcccgaaatcctttttctatcgcctgcgctacctcggcggcagaaaggctttctttataggagtcgggggcaattacgattttcatagtggtagcctgttactgcacaacgccggatggcgtttcacttatccagtctgaaattcaggcccggatcgctacacgccatccgggcacaacgtcgttagcgagtgacttccactttcgccagtttttcgtagtagcacgccagcgcgctatggtcgtcattaccgtgtccatccgcgcgtaacgcctgcatcatttccataacggcggcggtcagcgggagctgcgcgccaacgccgtgggaggtatccagcgcattcgccagatctttaatgtgcagatcgatacggaaacctggcttaaagtttcggtccatgaccatcggcgctttcgcatccagtaccgtgctgccagccagaccgccgcgaatcgcctgatagaccagatccgggttgacgcccgctttagtcgccagcgtcagcgcttcagacatggcggcgatattcaacgccacgatcacctggttagccagttttgtgacgttgcctgcgccgatatcgccggtatgcaccacggaacccgccatcgctttcatcaggtcgtagtacttgtcgaaaatggctttatcgccccccaccatcaccgacagcgtgccatcaatcgccttcggctcgccgccgctgaccggcgcatccaacatctcaacgcccttcgccttcagcgcatcgctgatttcacggcttgccagcggcgcgatagaactcatatcaatcaatacggttcctggcttcgcgccttcgatgataccgttctcgcccagcgcaacctctttcacatgcggagagttaggcagcatcgtgatgatgacgtcacactgttcagcgatcgccttcgccgtagaggccgtttccgcgcctgcggcaatgacgtcagcaatcgcttcaggattacgatcggacaccaccagcgaataccctgcttttagtaagtttttgctcatgggcttacccatgatgcctaagccaataaagccaactttcatcgtcatagcgttctctctttccataccaggattattttttaaaggtgtcggcaagcttctgcgtgctggcgcggaatgcgcctaaatcgctgccaacggcgacaaaggtcgcgccccattccagataacggcgggcatccgcctctaccggcgccagaatgccgcacggtttaccgtgcgctttagcgcgggcgaaaatatgttgaatcgtctgctgcacgtcagggtgagaagcattgccgagatgacccagcgcggcggccaaatcgcttgggccgacaaaaatgccatcaacgccttccgttgcggcgatggcatcaacattgtcgacacccaactggctttcgatttgaacaataatggtgatgtttttgttcgactgcgcaaagtaatcaggcaccgtaccgaacatattcgcgcggtgagaaacggagacgccgcgaatgccttccggcgggtaacgcgtcgaggcgacggcgcgagccgcttcctcttgcgtttcaacaaaggggatcaggaagttataaaacccaatatccagcatccgtttgataatgaccggttcattggttggcacacgtaccacaggcgcgctggcgctgcctttcaatgccattagctgcggaattaaggtggtcacatcgttcggcgcatgttcgccatccagcaccagccagtcaaatcccgccagaccgagaacttcggtggtgattgggcttgccagtgcagaccagcagccaatctgcacctgttgcgccgctagcgccgctttaaacttattcgggaaaatagcgttattcatcgcttataccttcgcttatttctttaattctctacatgtgatgccgccaccataacttatagcaacgacaataaaatgcttatctgaaatcagaatgggtctccgcattctatttctaatgtggtacacatcctgtagcacaatataccgttctgatatctttatcgtcttttattattatcatggtattttcaaataactcgtcagatacactgaattcgccattcagtataaacagcctatggcggataatcattgtgcaaacgctcattaaaaagggattatttaacgcttatttttgagcatacgcccatgatactgggcgctaatgcacacatttacgctttacccggcctacataaaaaatttcataatttgcggtgatctggatcacattcttatatttatactcctgtcattcttatttcattatgcatgaactttatttcttatattgagatttaacgatttaaccataaccaaaatagataatcctatttctatcatccaggctggagaatgttgaacaatggccaatatcgaaattcgccaggaatcgccatcggcgttttatataaaagtacatgaaaccgataatgtcgcaattattgttaatgaccacggtcttaaagccggaacacgttttccggatggcctggaactgactgaacatattccgcaaggccataaagttgctctgacggatatccccgctcacggcgaaatcatccgttatggcgaagtcatcggttatgcggtacgcgacatcccgcgcggaagctggatcgacgagtcgctggttgaactgccaaaagcgccgccgctgaatacgctaccgctggcgaccaaagtaccggaaccgctgccgccgctggaaggctatacgtttgagggctatcgtaacgccgatggcagcgtcggcaccaaaaatctgcttggcattaccaccagcgtgcactgtgtggcgggcgtggtcgattatgtggtgaaagtgattgagcgcgatctcctgcccaaatacccgaatgtcgatggcgttgtagggctaaaccatctgtacggctgcggcgtggcaatcaacgcgccggcggcggtcgtgccgattcgcacgattcataatatcgcgctcaaccccaattttggcggcgaagtgatggtgattggcctcggttgcgaaaaactgcagccggaacggctgctggaaggcaccgaggatgttcccgccatcgccgttgaaagcgccagtattgtgcgtttacaggacgagcagcatgtcggctttaaatcaatggtcgacgatattttgcgggtcgccgaacgccatctgacgaaactgaaccagcgccagcgcgaaacctgcccggcctccgagctggtcgtcgggatgcaatgcggcggcagcgatgcgttttctggcgtcacggcaaacccggcggtgggttatgcttccgatctgctggtacgctgcggcgcgaccgtcatgttctcggaggtcaccgaagtgcgcgatgccattcatcttctgacgccgcgcgccatcaacgaagccgtgggtaaacgcctactggatgaaatggcctggtacgataactaccttgatatggggaaaaccgatcgcagcgctaacccgtcccccggcaacaaaaaaggcggcctggcgaacgtcgtggaaaaagcgctgggctctatcgctaaatcgggtaagagcgccattgtcgaagtattgtcgccgggccagcgccccaccaaacgcggcctgatttacgccgcgacgcccgccagcgatttcgtctgcggcacgcagcaggtcgcttccggcattaccgtacaggtctttaccaccggacgcggcacgccgtacgggctgatggcggtgccggtcattaaaatggcgacgcgtaccgagctggcgaaccgctggtatgacttaatggatatcaatgcaggcaccatcgccacgggtgaagagacaatcgaagatgtgggctggaagctatttcactttattctcgatgtcgccagcggccggaaaaagactttctcagatcaatggggattgcataaccagctggcagtgtttaaccccgcacctgtgacctgatctattctggaaagcgcctcgcaaaacatggcttaagggccatgttttcatatgtttgataaactgcgccatgttcataccggatatggcaaaaacacctaacccaccataaaaccattcaaattcaataaattgaaattctatgccaagcgcaaccttacgtttctcactaatttgagtcgcagcacatgcaatttgaggtatgtcgaatataacgacagcctattaatcacctttacttaattctgctgcctcatcaattctttaatttgtgccagcgtggacgtgccttccatcggcccacgcgcagagatagccagcgatcctgcggcattagcatgggctaaagcatcgggtacggaatatcccgcaagaaacaggctgacaaaggttgcgccaaagcaatcgccagcgcctgtaggatcaaccaccttcaccggatacccagccacatgatgttgttcgtcttttgaatagtaactggctccacgggcgccacgtttaatgatgacatgggcaattccacgcttgtgaagccttgcgacaattttctcttcatcgcgggatttgctcaggccgaaataatccagttcgccatcgcttggcaggaagaaatccgtgtaatcaagaatatattcaaaggcctgcgacatttcgcggatctttagcatctctttacggatattaggatcgaaagaaattgtgccaccattttcttttacaatgctaatcgccttgcgtacggcatcgatcaaacgaaaggaaaataatgacgatcccataatatgaaagtggcgatattgcctgagtaatgtttcatcaaggtggtcggcactcagcaaaccgcacgcactgtccggcatgttgaaaataaaatctcgctgggcctggcttcggtagctgacaaaagcactacctgttgtggcgttcggcagtacggaaattccctgtacatttacgccatcgcgcgacaatcgggtaatattcataacgccaaaggcatcgttgccaacacagctaaacaacaatgaacgaaaaccaagtttagcaacctgatcggcaaatatggcaggcgccccactgggatacggcccccaaaattcccccggtgaggaaaatccctggttctctttttttgccagaaactcgacgagcaattcacccaatgttgcgattgttatgttcatgcgttgtccttcatcttgcctgatgcagggtcgggtttatccaggtcagacattcgttattggtatagctgttggttaagccgtcggccagaaaccgtgagtggtactcagcggcgacaatctgtggcgtaataatcgcgctcagcgtattcagttttcctaccggataacgcgccacatcatgaatcggacgctgcgccaccacggcaatactctgtccactaaggcgcaggcattcacttagcaaagcagctgcactttcgtttttcacgttgagcgtgccatcctcgctgatatggtccaccatcaccagacaacatgacggttgaaattgttgcaaagattggatggcgatttcgccccccaacgcctgaccactatgccccagtacaccgcccaacaacacaatttcaccatcgatataatcacgggccggtgcaacatggctaagatcgttgatgataaggcacagatcccgataatcgcccaggaaaggaagcgctttacgcaacacctctccggcccccagaaacacggtatcgtcgtcgcagaccagacgggcaacttgcttagccagttcaagctctacgctatgctctaacgcctgcgactgcaccacttcatggcttaccgctgctctgacgggttgggccgtgtaaatcgctccgccaaaggagcgtttcagatagccttgctgctccaggtaattgagatcattacggatcgttacccctgaaaccgataacatttcagccaaatcgtctacttttatttcgccgtttttacggacgatttcggcaatgtccagacgccttttcaacaggctggtagatggttttgccacaacataccctttttttccgcttcgtcgggaagttatcccgtgctttaactttcatttttaaacttctgacaggggatgtcaattttgcaccacgtcaccgaatgctcaatggaaaacatcacaataaaatcaagtaattatagaattttcatatcttccatttacttacaaaacaaaatttaaatccacactttttctttcatttaagaaaaattatcctgcttttgtgttgatgatcacaatcatgtgtggcaatgatcgttacattactttcaaaacgaaggttatttttattttaaactttaatttcgaaagttataaacggagaccactatgttcattatttccagtaaaaatatgctccagaaggcccagcatgcaggctatgccgtgccagcctttaacatccataacctggaaaccttgcaggtggtggtagaaaccgccgcagaaatgcgctcaccgctgatcgttgccggaacaccaggcacgtttagctatgccggaatgggtaacattgtggcgatcgcgggcgatctggctcgtgaatacaatctgccactggccattcatctggatcatcatgaatcgttagccgatattgaaagcaaagttatggcagggatccgttcagtcatgatcgatggttcccactttccctttgaagagaatgtggcgctggtgaaaagcgtggtcgatttttgccatcgctacgacaccagcgtggaggcagaactgggccgccttggtgggatcgaagatgatttagtggtagacagcaaagatgccctttacaccaatccacagcaagcacgtgagtttgtggcgcgcaccggcattgattcgctggcggttgctatcggcacggcacacggcatgtatgccgctgaacctaaacttgattttgagcgactggcagaaatacgcgctctggtggatatccctctggtattgcatggggcatctggtttgccggaaagcgatattcgccaggccatcagccttggggtatgcaaagtcaatgttgccaccgaactgaaaatcgccttctccgacgccttaaaagagtatttcctacaaaacccgaaagccaatgatccccgccactatatgcaaccagcaaaacaggcgatgaaagaggtggtacgcaaagtaattcatgtttgcggctgtgaagggcaactgtgaggaatcgcctgtgatctacacgctaacacttaatagcgcgattgatatgaatatatttagcgatcctttacagccaaatattgtcaatcgcactcaccacaccgagttttgcccaaatggtaaaggggtaaatgttgcgctggttctggatcactttcaaatacctgcgcatatattaggcatttttggtggtttcaccgggcattatattgtagaaagcctgcgtacccgaaaaatgccagtcacaccagcatgggtagaagaacccacgcggattaatattttcattcatgacggtaagcaggaatataaactggtcaaccctggctcatatattccagatgaatgtaaacaacaaattatcacgattatttcgcaactgcccgatgcagactatctggtgataagcggcagcctgccacaaggtattgaaagccgcttttacgcagaaatcatgcatatttgtcagcaaaaaaatatcggcgtaattttagatattagtcatccgtcattacgtcagttactggagttcaaaccgttattaattaaaccaaatgatgaagaggttaaagcaatattcggtttaactgtctctgacgacaatgatgcgaaaaatactctaaccactttacatgcacttggtgcacaaaatgttctgctaacccttggcgctaaaggaatgtatttctccaatgggattgattactggttttgtagcgcgccaacggttgatttggtgagctccgcctgtgcaggcgatgctgcactggccgcctttctcagccagtggttatctacaggagaagtggaatatgccttatctcttgccagtgcaacaggagctgatgtcgcaagttctgccggactaggccaacttgcggcaatagaaaccttactttcgcaaatccacgtcagaaagctgtaggttaaattacaatataaggtctgcttatgaaaaagatcattgcagtgaccggctgccctaccggtattgcgcatacatttatggctgaagaagccttaaaaaatgccgcgaaaaaattatctgttgaaataaaagttgaaaccaatggtgccagtggcgttgaaaatgctattcaacctgctgatctggtagatattgccggagtcattattgcggcggataaagatgtcttacctgatcgctttaatggtttaccggttattgaagtaccggtaaaagaagcaatccatcatcctgcggagctgattaacaaagttattaatggtgaagccccaatacgtaaaggcgaatcaaccaccagcacggaaattatcgaaaaagaatcactggggcgacaaatttataagcacctgatgagtggtgtttcaaatatgctaccttttgtagttgccggaggcatattaattgcggtgtcgtttttatgggggatttattccgctgatcctaattcagctgaatacaatgcaaccgccgcaatgctaatgaaaatcggtcagcaagccttttcgattatggttccggtctttaccgcttatattgcattctctatttctggcagaccagggatggtggctggatttgtcggcggcttactggcaaatgctaccggcgcaggatttcttggtgggataattgccggattcgccgccggttacctgatgttatgggtaaagaatcgactcgaaggcttaccgcgtcagtatgaaggcctgaaatcgatttttattatgccgctcattggcgtactggttattggcgtgttgatgtcgctgcttgggcaacctgtcgcagctatcaataatagcatgatgaactggctggcatcgctacaggaagcgaatccaatattgctgggtattgtggtgggtgcaatgtgctcctttgactttggcggcccggtaaacaaagccgcttatgtcaccggcacgcttttactgggccaaggcaacttctactttatggctggtgtgtctgccgcatgtattactccaccactggtaattgctctggcgaccaccttctttccaaaaggttttagcgaggaagaacgtgccgcaggcatggttaactatatcctcggttgtacacacatcactgaaggcgcgattcctttcgcagcgaaagatcctttgcgtgtcatcccgatgatgatgattgcttccagcatttccgcagtacttagctacagcttgcgtattcaggttccggctcctcacggcggcttcttaattttacctttggtgagtcagccgctggcctgggtgttatgtatccttgcgggctctgcatgtggtgcggtgatgcttggcctatggagattgtgggctgtgcgcaaaaattcagtcaacacaactcctgtagcaaaggctggaggtcagaatgcagctctgtgaacacgatatttttatcagcgatgagcgcctcgataaagtcaccgctctgcaccgtgtggtggaaaagttatctgcggctggcaataccacgactgactatttacgcggcatgttggatcgcgaagcacagatttccacttatctgggaaatggaatcgcgatcccacacggtacgccagagtctcgcgatgcggtattacaaaccggtgtaaaggtaatcgtttttcgccacggcgttgactggggtgacggcaataccgcgtatctggtcaccggaattgccgcgcgctccaatgaacatcttgagattttgcgccaactgactcgcgtgctcagcgatgacgctattctgcaagcactggctaaagccgaatcccccagtcaggttttagcgctactgactggatcgacgaccaatacgccagcagccgtggagttgcaggagggtgagcaggcaacgtttgtcatccataatccgcatggtttacatgccagacccagtgcggtactggtgaagtttatcaaacagtttcaaagccacattacggtagaaaatctggataacgcctccggcccggtggacgggaaaaacctgatgcgagtggtgtcgctcggcgcgaaaaaggggcatcgcttgttgttccgggcgcagggcgaagatgcacagcaggcactacgtgaaatcggggagcttatcgcctctggtgcaggcgagatgatcaccgttcccgttaccccaccaccagaagtcatgcagccaaagcgcagttggctatctcgattgtttaattagccttcatttgttcctccgtgcccgctccggcgggtacggtttttcatgacaaagtgaagttacagacattacacaccatttcgttaccttacatttcctttcgaaactttcatttatcagatcaaaatcacaaaacaacattacgaaagcctataaattctttcgaagaagaaaaacgaaagaactcggagataaaagtgaaagaaataattgctcgtcataaagcaggagaacatctgggcatctgttcagtttgttctgctcatcccctggttatcgaatcagctctgcttttcgatctcaatactgacaacaaggtattgattgaagccacatccaatcaggtgaatcagtttggcggttataccggaatgaaaccggctgattttcgtgattttgtttatggcattgctcaggaagtgggatttccacgtgagcggttgattcttggtggcgatcatttagggcctaactgctggcagaacgaaccggcagcggcggcaatggaaaagtcggttgagttaataaaagcgtatgtcgccgctggttttagcaaaattcacctggacgcgtcaatgtcctgcgctgacgacccgacaccgttggatccgatggtcgttgcacgccgtgccgccgtgctttgtaaagcagcagaagggaccgcaaacgaagaacaaaaatgccatctgacttatgtcatcggcacggaagtgcccgttcctggcggtgaagccagtaccatcggcagcgttcatgtcacccgcgaagtcgatgctgcacgtacgctggaaactcaccaaatcgcgtttcgtgaatcaggtctggaagaagcactgtcacgcgtgatcgccattgtggtacagccgggcgttgaatttgatcatacccagattattcattatcagccgcaggcggcacaggcgctctccgcatggataaaagaaacgccgatggtctatgaagcgcattcgactgattatcagacgcggcaggcctaccgtgcgctggtacgcgatcattacgccattctgaaggtcggcccggcgctcactttcgcgctgcgcgaagccattttcgcacttgcgcaaatggaaaacgagctgatctccccggaacaacgtagtcgggtactggaggtcattgatgaagttatgctaaacgaaccgggctactggaaaaaatactaccgtccaacctggagccaggcgatggtcgacatccactttagtttgtctgaccgtattcgctattactggccgcacccgcgtattcgtcaaagcgtagagaagttaatcgccaatctgaacaacgtcacattgccgctgggattaattagccagtttatgcccgtacagtttgaacgcctgtctgagggcgtgctcacccctacgccgcataacctgattattgacaaaattcaggatgttctgcgcgcttatcgcttcggttgcacgccggatgtcgcctgaataatggagaatttatgagccaactatttgtccgaaccggaatcacattcgactcgagccaacaggcgctggcgcacattggcaaagagatgctggcgaaaggcgtggtacatgatagttatccgcaggcgctggtggaacgtgaagcgtcttttcctaccggcattgcgctggagcgtcacgccgtcgctatccctcattgcgaggccgttcatgcgaaatcacccgctatctatctgattcgtccagataagccggtcatgtttcaacaggcggatgatgacgaagagattgccgtttcgttaatcatcgccttaatcgttgaaaacccggcggcacagctaaaacttctgcgccgcctgtttagtgagctacagaacccaagcaccctcgatgccctgttaagcgcgccggatgccgaactggcgatacgctttcaggaaaccatccttgagcctgagcagtgcgtccaggtttgataataaattgataataatgaggaataccctatgaaacgtaaagtaattgtggcctgtggcggtgcggttgcaacctcaacgatggctgcggaagaaattaaagagctgtgtgatgccaaccatattgagctcgacttagtgcaatgccgggtcaccgaaatcgaaacctatatggacggcgccgatcttatctgtaccactgccagggtcgatcgcgcctttggcaatattcccgtcgttcacggtatgccttttgtttccggcgtgggtattgaagcattacagcaaaaaattctgtccattctcatggggtaacgtatgtttagcgaaataatgcgttatatcctcgacttaggcccaacggtgatgctgcctctggtgatcatcgtgttctctaaactgctgggaatgaagcttggggattgttttaaatcgggtttgcatattggtatcggcttcgtgggtattggtctggtcatcggcctgatgctggattctatcggccccgcggcgaaagccatggcggaacatttccaaatcaatctccacgttattgacgtcggctggccgggttcatcgcccatgacctgggcgtcacaaatcgcgctggtcgcgatccctgtcgccatcggggttaacgtcctgatgctagtgacccgcatgacccgcgtggtgaatgtcgatatctggaatatctggcacatgaccttcacgggcgccatgctgcatctggcgaccggttcatactggctggggattctgggcgttgtggttcatgccgcctttgtctacaaactgggggactggtttgccaaagatacccgcgactattttggcctcgaggggattgctatcccacacggctcatccgcgtacctgggccccgtggcggtgctcgttgataccattatcgagaaaattccgggtctcaatcgtattcactttagcgcagacgatgtccagaaacgcttcggaccgtttggcgagccggtgactgtcggcttcgtgatggggctggtgattggtgtactggcaggctacgacgccaaagccgttctgcaactggcggtcaaaaccgcagcggtgatgctgcttatgccacgcgtcattaaacctattatggatggcctaacgcctatcgcgaaacatgcgcgtaaacgtctacaggctaaatttggcgggcaggagttcctgataggccttgatccagcgctactgctcggtcatacctctgttgtctccgcgagcctgatattcattccgctgaccatcctgattgccgtcttagtaccggggaaccaggtgctgccgttcggcgacctcgccaccatcggtttctttattgcgatggcggtcgcggtacaccagggcaacctgttccgcacgctgatttcaggtgtcattattatgggtatcaccctgtggatagccacccagacgattggcctgcatacccaactggctgccaatgccggagcgctaaaagctggcggacaagtcgcctcgctggatcagggcggttcccccatcacctggctgctgattcaactttttacctggcagaatatcgtcggcttcgccgtcattgccattatctatctggccggcgtactgctgacctggcgtcgcgcccgacagtttgtcgcggctgagaaagccacggcgctacagcaaagtcaaatcgcctcttaattttaggggagcaatcgctcccctcaccttcctggagaatgttatgaaatcagtggttattcacgctgagggagacgtgcgcgttgaagaacgtcccttaccacaactgcaagccgaggacgatgtgttggtcaaggtcgttagctcagggctttgcgggtcggatatcccgcgtattttcgcgcagggcgcccattattatcctattacgttaggtcatgaattcagcggctacgttgaatcctacggcacaggcgtaacggatatgcagcccggcgatgccgtcgcttgtgtcccgcttcttccctgctttcactgtccgcaatgcgaacgcggttacttttctttatgcaaacagtatcagtttgtaggatcgcgcagcgaaggcggtaatgcggaatatgtggtggtcaaacgggccaatcttttccgcttgccttctgatatgccgattgaagatggcgcgtttatcgaaccgattaccgtgggcttacacgcctttcatctggcgcagggctgcgaggggaaaaacgtaattatcgtcggtgccgggacaattggcctgctggccttacagtgcgcgcgggaactgggcgcgcgaagcgtaacggcgattgatatcaatccgcagaaactggaactggcgaaagcgctcggcgcaacgcatacctgtaatagccgggaaatgaccgccgacgacatccagaccgcgttgtccgacattcagtttgatcaactggttctcgaaacggcaggaactccccagaccgtctcgctggctatcgatatcgccgggccgcgcgcgcaactggcgctggtggggacgttacatcacgatctcaccctgacaacgcgtacattcgggctaattttgcgtaaagagctcacgctcctcggcagttggatgaactactccgcgccatggccaggagaagaatgggaaaccgcagcgcgcctgttggctgaaaaacgtcttcaactgacccctctcattgcccatcgcggcgatgcggaaagctttgcagaagcagtcaaagcgcttaatggcgcgcccatgcagggcaaaattttacttcaactttcctgatggtacgagccagcaacctgcgctggctcacatttcctttcgaaatttagcgttcacctttcgcaatccttcgtttaaactagttacagttaattatcaggcaaatcaatatgaactcatttgagcgaagaaataaaattgtcgacctgattaatacgcaaggcagcgtgctggtgatggacctttcaaatacctttggtatttctgaagtgactatccgtgctgacctgcgtctgctggaagagaaaggccttgtcacccgttttcatggcggcgcggcaaaaccgggaagtcatctggcggaaggcgacaatcaggaagtcattctggaagatcggtatcaactcgccagcgatccgaaaaagcggattgcccaggcggctgcggcaatggttgaagaaggaatgaccatcattctggatagcgggagcacaacattactgattgcggaagcgctcgcgcgaaaaagcaatattacggtgatcactaacagcttgcctgccgcttttacgctatcagaaaataaagatctcacgctggtggtctgcggcggtacggtacggcataaaacccactcaatgcacggcacgattgcggaacgatcgctacacggcatcagcgccgatttaatgtttgtcggggcggatggcattgatgcgacaaacggtattaccacgtttaacgaaggttattccattagcggcgtcatggcggcggcggcacacaaagttatcgcggtactggacgcgaccaaatttaaccgtcgcggctttaaccaggtattgccgatggacaagatcgactgtgtgataaccgatgacaccatcagcaaacaggataaagcggcattagcgaaaacaggcgtggaattaatgatcgtctaaaaaggagtcggttatgcgttgctgatcgcgagagtaagcccgaaggaaaggtccggcccgctatcaccgcccaatgcccccatcaatttacccacatcaatcacctgattgagtattaacacgatggcgataaaaggcggttcccgggcgctcgcttttattcttcctgctgctccagcgcatacttatacagcgcatttttcttcacgccgtgaatttctgctgccagcgccgccgcttttttcagcggcagttctgcctgtagcagcgccagcgtgcgcagcgcgtcggcgggcaggtcgtcttcttgcgctttatggccttcgacaatcagcaccatttcgcctttgcgacggttttcatcttctttgacccacgccagcagctcgccgaccggcgcgccgtgaatggtttcccaggttttggtcagctcacgcgccagcaccacataacgggattctcccaataccgcgacgatatcttccaggctatctaacaggcggtgggttgactcataaaaaatcagcgttcgcggttccgtttcaatggcttttagcgcatcacggcggcctttggatttcgccggtaaaaagccttcatagcagaaacggtcggatggcaggccagcggcgctcagggcggcaatcgccgcacacggccccggtagcggcaccacgcgaatccccgcttcgcgacaagtacgcaccaggtggtagcccggatcgttaatcagcggcgtaccggcgtcggaaaccagcgcaatgttctgcccttcttttagcttcgcgaccagcgtttccgctttttgttgttcgttatggtcgtgcagcgcgaacaaccgggcattaatcccaaaatgttgcagcaataaaccggtgtgacgagtatcttcggcggcaatcagatctacagcctgtaacacctccaacgcacgctgggtaatatccgccagattaccgataggagtaggtacaataaagagttggccctgagaattatccgccgattcgttttgtttcattgtgtcgtccgtattgccgatttaatattgagcattgcgtaaaaaaatatcactggatacagtatggtaccctcaacattttctcgtttgaacgccgcacgcgcgctgcctgtcgtcctggctgcgctacttttcgccgggtgcggcacccaggcgccagatcaaagcgcagcctatatgcagggttcagcgcaagctgactccgccttttacctgcatcagatgcagcaaagcgcagatgatagcaagaccaactggcaattactcgccattcatgcactgctgaaagaaggaaaaagccagcaggccgtcgacctgttcaaccaactcccgcaaaatctgaacgatacccagcgtcgcgaacagtctttattagcggtagaaatcaaactggcgcaaaaagatgtcgcaggcgcgcaggccttgctggataaactaaaacccgccgactttgcgccaaatcaacaagcgcgttactggcaggcgcagatcgttgccagccagggacgcccgtcgcttaccctgttgcgggcgttaatcgcccaggaaccgctactggcggcgaaagataaacaaaaaaatatcgacgccacctggcaggcgctctccgccatgacgccggatcaggccaggacgttagttatcaacgctgatgaaaatgtgcttcagggctggctggatctgcaacgcgtctggtttgacaaccgcaacgatccagacatgctgaaagctgggatcgccgactggcaaaaacgctacccgcaaaatccgggggcgaaaatgctgccgacgcagctcgtcaatgtacaacgtttcaaaccggcttccaccagcaaaatcgctctgctgctgccgctgaacggtcaggctgccgtgtttggccgtaccatccagcaaggtttcgaagccgcgaaaaacctcggcacccaggcggtggagatgcagcctgccgccgctcctgacgcgccggtcgaacctggcgtggaggagacgcaaccacaaatgaccaacggcgtcgccagtccgtcgcaggcctcggtgagcgatctgactgatgacgctccagcccagtccgctacgccagtcagcgcgccacaaactccccctgctacagcaagcgcgccggcggatccctccgctgaattaaaaatttacgatacctcttcccagccgttggatcaggtgcttgctcaggttcagcaagacggcgccagtatcgtggtcgggccgctgttgaaaaacaatgtggaagcgctgatgaaaagcaacacgccgctcaacgtgctggcgctcaaccagccggaaacggtacgtagcttccctaatatctgctatttcgcgctctctccagaagatgaagcccgtgacgcggcgcatcatatttatgaccagggcaagcagtcgccgctgctgttgattccacgcagcgcgcttggcgatcgcgtggcgaacgccttcacccaggagtggcaaaaactgggcggcggcatcgtgttacagcaaaaattcggctccgtagccgagctgaaaatgggcgtgaacggcggcgcgggtatcgcgttgactggcagtccagtcgccgccagcgtgcctgcgcagcctggcgtcaccattggcggtctgaccatccctgcgccgccgaccgacgcgcaaatcaccggcggcggacgcgtagacgcggtctatattctggctacgccggaagagattggctttatcaaaccgatgatcgccatgcgtaacggcacccagagcggcgcgacgctgtatgccagctctcgcagcgcgcaaggcacctccggccccgacttccgtctggaaatggagggtttacaatacagtgaaattcctatgctggcaggcggcaatatgccgttgatgcagcaggcgctgagcgctgtacataacgactattctctggcgcggatgtacgccatgggcgtggatgcctggacgctggcgaaccacttttcgcagatgcgtcaggtgcaggggtttgagatcaatggcaataccggcgcattaaccgccagcccggattgtgtgattaacaggaagttatcatggctcaaataccagcaaggggagattgttcccgccagctaacgcgtaaacaggctggcgacgcgtgggaagctgccgcgcgtcgctggctggaaagcaaaggactgcggtttatcgccgccaacgtgcgcgagcgcggcggcgaaatcgatctgatcatgcgcgacggaaaaacgacggtttttgttgaggtccgctatcggcgctccgggctttatggcggcgcggcggctagtgtgacccgcagcaagcaacacaaattattacatactgcccgcttgtggctcgcccgccagaatgggagttttgatactgtggattgtcggttcgatgtgttagccttcaccggaaatgagattgagtggtttcgggatgcgtttaacgaccactcataattgaagattttaaggattagcgtgctcgaaagaatcaaagtttgctttacagaaagcattcaaactcaaattgctgcggcggaagcgcttccggatgccatttcccgcgccgccatgacgctggttcattccctgcttaacggcaacaaaatcctctgttgtggaaacgggacgtccgcggccaacgcacagcattttgctgccagcatgattaaccgctttgaaacggagcgacccagtttacccgccattgcactaaataccgataatgtggtcttaactgcgatcgctaacgatcgcttgcacgatgaagtttatgcaaaacaagtccgggcgctgggacatgcaggcgatgttttattggcgatctctacgcgtggtaatagtcgcgatatcgtaaaagccgttgaagcagccgtcacacgtgacatgaccattgtggcgctaaccgggtatgacgggggtgagctggccggactattagggccgcaggatgtcgaaattcgtatcccttcacaccacagcgcgcgcattcaggaaatgcatatgctgacggtaaactgcctgtgcgatttgatcgataacacgctttttcctcaccaggatgattaaggagtacacatgaaggcattttcgccgctcgcagtccttatttctgcgttgctattgcaaggttgcgtcgccgccgcggtagtgggtacggcagccgtcggtaccaaagccgcaaccgacccgcgtagcgtgggcacccaggtggatgacggaacgctggaactgcgtgtcagcagcgcgctgtcgaaagatgagcaaatcaaaaaagagacgcgcatcaatgtcacggcttatcagggcaaagttttgttagtgggccagtcgccaaacagcgaactctccgcacgcgctaaacagatagcgatgggcgttgaaggcaccaccgaggtctataacgagattcgccagggtcagcctatcggcctggggaccgcctctaacgatacctggatcaccacgaaagttcgctcacagctactgaccagcgatcaggtaaaatcgtcaaacgtgaaagtcaccaccgagaatggcgaagtgttcctgctgggcctggtgactgaacgtgaaggtaaagcggcagcagacatcgccagccgggtgagcggcgtgaaacgcgtgaccaccgcctttacgtatattaagtaaccggtgtgccgggtggcgataagaatgtgtaaaccgcgtcgccatccggtaaatcatccggcttcgctactccgctttttcccgcagttgcgatgaggtcagaatcgtcacgccttcttgtgctggcgccagcgcttccgccagcatggcccgcgccacatcccgcgcatcgatcgatttccagtttcctggcaacagccggaatagcggagcgaaaagcgtttcattcacccgccgcgttgttctgtcgccgagcagcatagaaggtcgggcaatcgtcaaacgaggccaattttgcgcgattaacgcctcctccatttctcctttcacccgattgtagaaaaacggagagtgcgcgtttgctcccattgcgctgaccaccaccatgtgctgcgcacccagtcgacgtccggtcagcgcagtatcaaccaccagcgtataatccgcatgaataaacgccgctttacttcccgcttcacgccgggtcgtgcccaggcagcaaaaaacaatatctaccgggtcggtcacctgagctaacgcatcggtaagctgcggatcgtgagggttataaacgccgacaatatccgtcagcgggcgacgcgtcggcgcggcgatagcgctcacctgcggcgtgttgattaacattctcagcagatgtccgccgaccagtccggtcgcgccggtaatcagtacctgactcatcctcgctcctttacagatttgtccaccttgcactctcggccctatcgaccaggcttaatagtctacgaggtaagtatccatcattgtggaaaatttgccttacccgacgccaccactgcggaggaaacgcatgagtaagaaaattgccgttttgattaccgatgaatttgaagattcagaatttacctcgccggcagcagaattccgtcaggccggccatgaggtcatcaccatcgaaaaagaggcgggtaaaacggtgaaaggaaaaaaaggcgaggccagcgtcaccattgataaggctattgatgacgttcgtcccgacgagttcgacgccttgctattgccgggaggtcattcgccggactacctgcgcggcgacagccgtttcgtggattttacccgcgatttcgttaacagcggtaaaccggtttttgccatttgccacggcccgcagttgttgatcagcgccgatgtcattcgtggccgcaaactcacggcggtgaaaccgattattatcgatgtgaagaacgcgggcgcggaattttacgatcaggaagtcgtcgtcgataaagatcagctggtgaccagccgcacgcctgacgacctgccggcatttaaccgcgaggcgctacgcctgctgggcgcgtgagtcacgtaaccagtgcagttttttaccaaaccccagcgtgttgtcggtgaatttaatttcatccagccggatttcccataccggcgctggcagcaccctggcgaccgggaagcgacgaaggtaagctttacgcgcggcgtcgctctcctgcccctccagacggcgaatttcccctttaaactgcacgccgcgaatgcgcgccaccgttttcggctgcccattgaccgttcccgcaactggcgcgcacgcgccggacatttgcgcatggcgggttttatcatccgttaacagatacagtgcgacgttttgcgcatcgaacaaataaaacgcattggcgcaccacagctctccctcatggtgtacgcaccaggtcaccacgtgttgtttcgccagccaacggccaatagcggtaagtgtgtccatctttattctcgcttatactgggaacctgaaaattatcatgctgatggcgacaatgaccccctggtatctgtatctgattcgtactgcagacaatgcgctttacaccggaataaccaccgatgtggcgcgtcgttacaggcagcatcaaacgggaaaaggcgcaaaagcattacggggaaaaggcgagttaacgctggcgtttgcggcgcaggtcggcgatcgctcgctggccctgcgcatagagtatcgcatcaaacagctcacaaagcgccagaaagagcgccttgtgacggaacgcgaagcgtttgaggcgctgctgtccagcctgcaaacgccggtgcttaaaaacgattgaagtggtcgtgatactccaccagccccgtcacgccctccagcgcatcctcagccaaacggtgtacctggaaagcgctttccgtaccgggccaacggcagtgaagatcgtaatgtgcggccagttcaaaaccgaagcggctatataacgccggatcgcccagcgtcacgaccgccgcgtagccgaactcgttgagcgaatccagcccttcatacactaactggcgcgccagcccttgcccgcgatacttttcatcgaccgccagcggcgccatgccgacccactgtaaatcttcgccctgcacatcaaccgggctaaaggcgacatagcccaccacctgaccttcatcatccgtggccaccagtccgagcgtcagaaaaccatcttcacgcaaatcgtgaaccagcttcgcttccgcatcgctttcgaatgaacggcgtaacagcgcatcaataccaggcgcatcaataggaatttctactcgaattagcatggttcacctaccgaggtctgtttggtttccggcgagtttttcattcccgcctcaacaaaatccgccagttgcagcagcataacgcgtaacgctttcggcatctgctccagttcgatggcgtccatcagattcttcacatacaaccctaactcagtatcgccttcaatgaccagtcgacgctggaaaaagagcgtatccggatcctgtttacgggcggcgatcattagcagatcgctggcgtcggcgctaaaactgacgtcagcatccgcctgctggctaacgatcagcttttcattttcaaccgtggtataccattttaagtcgatgtcacgaacatgaatgcttaaccaacgaccttcgaggaattccagctctccatcggccagcgcctgacgaaactgccagctcagaacctgttccagaacctggcgctttagcgcaaagggcgtcagtttaaccggtacactcatcagagacgggccagcatggactaagcgtgaacgcagtttatctaacacgagctttactccctgtttcaatagtcctgttattttgccatatccaataaatcacatggcggcgtaaatcaacaattgggtctgattttctaccccattattggtgttaccaatacgcctttaactgccttaaatcaaaaattgtcgcagcaaggttaactaaaatccctgttcgttaacaattttgcgtctcagacgtaaccctcaggataaattatggagctgctctgccctgccggaaatctcccggcgctgaaggcggccatcgaaaacggcgctgacgccgtttatatcgggttaaaagacgataccaatgcccgtcattttgccggccttaactttaccgaaaaaaaattgcaggaagcggtgagttttgttcaccagcatcgccgcaaattacacatcgccattaatacttttgcgcatccggacggctatgcccgctggcagcgcgccgtggatatggcggcgcagcttggcgccgacgcgttgattctcgccgacctcgctatgctggaatatgccgcagagcgttacccgcatattgagcgccatgtttccgttcaggcctcggcaaccaacgaagaggcgattcgcttttatcaccgcaactttgatgtccaccgtgtagtactgccgcgtgtactgtcgattcaccaggtaaaacaactagcccgcgtcacgccggtgccgctggaggtattcgcgtttggcagcctgtgcattatggcggaaggtcgctgctatctttcttcctacctgacgggggagtcgcccaataccgtcggcgcctgctcgcccgcccgctttgtccgttggcagcaaacgccgcaggggctggaatcgcgcctgaatgatgtcctgattgaccgttaccaggatggcgaaaacgcgggctacccaacgctgtgcaaaggccgctatttagtggacggcgagcgctatcacgcgctggaggagccaaccagcctgaacacgctggaactgctgccggagctcatggcggcgaacatcgcttcggtgaagatcgaaggccgccagcgcagcccggcctatgtcagccaggtggcgaaagtgtggcgccaggcgatcgatcgctgcaaagccgccccgcaaaacttcgttccacagcgcgactggatggagacgctcggcgcgatgtccgaaggcacccaaaccacgcttggcgcatatcaccgtaaatggcagtgagaggagctatgaaatattccttaggaccggtgctttattactggccgaaagagacgctggaagatttttatcagcaggccgcaaaaagcagcgctgatgtcatttatctgggcgaagcggtgtgcagcaagcgtcgcgcgaccaaagtcggcgactggctggaaatggcgaaatccctcgccgccagcggtaagcaggtggtgctctccaccctggcgctggtacaggcgtcatctgaattaagcgagctgaaacgctatgtggacaacggcgattttctgctggaagccagcgatcttggcgtggtgaatctgtgcgccgagcgcaaactgccgtttgtcgccggccatgcgctgaactgctacaacgcggtcacgctgcgccggttgctgaaagaaggcatggtacgctggtgtatgccggtggagctgtcccgcgactggctggtgaatttgcttaatcagtgcgatgaactgggcatccgcaatcagtttgaagtggaagtgttgagctacgggcatctgccgctggcctactccgctcgctgctttaccgcccgttcggaagaccgcccgaaagatgagtgcgaaacctgctgtatcaagtatccaaacggtcgtgacgtgctctcgcaagagaatcagcaggtgtttgtgcttaacggtattcagaccatgagcggctatgtctataaccttggcaacgaactgacgtcgatgcagggattggtcgatatcgtgcggctgtcgccgttggggacggagacatttgccatgcttgatgcctttcgcgctaacgaaaacggcggcgcgccattaccgcttgccgcgcatagcgactgtaacggctactggaagcggctggcaggtctggagctacaggcctagccggatggcggcataaataccttgtccggcctacaaatagcgatcccgtaggcccgataagcgcagcgccatcgggcattgtttttgccgtcagtctcataaagctcactttgttaacaacattcgctaatctttaatgcagtattaaaagattaaccggtaacaaagtgagccgttatgactgacaaaactattccgttctcggtgctggatctggcgccgatccctgaaggatcttcggcaaaagaagccttcacgcactcgctggatctcgcacggctggctgaaaagcgcggttatcaccgctactggctggcagaacatcacaacatgaccggtatcgccagcgcggcgacctcggtattgattggttatctggcagccaataccacaacattacatcttggctccggcggcgtgatgctgcctaaccattcaccgctggtgattgccgagcagttcggcacgctgaatacgctctacccgggacgtatcgacttagggttgggacgcgcgccgggtagcgatcagccgacgatgcgcgcgctgcgtcgccatatgagcggcgatatcgataactttccacgcgatgtcgcagagctggtggactggttcgacgctcgcgaccctaatccgcatgtgcgcccggtgcccggctacggcgagcagatcccggtctggctgttgggatccagcctgtatagtgcgcaactggcggcccagcttggcctgccgttcgcctttgcttcgcatttcgcgccggatatgttgttccaggcgctgcatctgtaccgtacccagttcaaaccttcagcgcggctggaaaaaccgtacgcgatggtgtgtatcaatattatcgccgccgacagcaaccgcgacgccgaattcctgtttacctccatgcagcaggctttcgtgaagctacgccgtggggaaaccggccaactgccgccgccgattgagaatatggagaccttccggtcgccatccgagcagtatggcgtgcagcaggcgctgagtatgtcgctggtcggtgataaagcgaaagtccgccacgggctggaatccatcctgcgggagacccaggcggatgaaattatggtaaacgggcagattttcgaccaccaggcacgcctgcattcgtttgatttagcgatggatgttaaggaagagttgttgggctgattttataacgccgattttcaacggtgatggttggcaatcggcgatttttttcgaagtaatcatagccgggcttcaacatacgccagaaattatattccggccatgcttgcgcctggcgcatattttcgtcattcatcgtaaatgggaagatatggacaggcacgctcttctgcccgctgtttagcgcctgcgccaccagttgataaatctcttcaataccggcatcggtcatggcatagcaaccggccgaaacgcagttcccgtgaaccataatgaaatcaccggtgtagccatttgcccgatcgtaagcattcgggtagccaatattaaatgccagatgatagcggctgtttgggttaagcaaccctttgttggtggcataaaagccttccgggcttttaccgtctccctgtttatgttttggccctaagccaccagaccatgcgcatatagtccaggttttgtagagtttgtaaggcttgttattggcgcttgcccacagttccagcttatcttccgctttcagaatgcggataaataactggtcgccggggtgaatgatttttaaagacgatgcgacaggtttttccactggcaggtaaacgtcttcatcgtacggagtgagccagaaaaattttaaaataaaagcgataaacaggctcaataatacaatagcgagtagtcctttacgccccattttcgtattccgcttattctgaaccagttcaagtatatattttcctatgatatgaaatagaggaaaggtccagttctgtacttttataaaatagtaatcgttttatcatggccgaacagggatatgaataaatcgacttattaccagagaaaatcatcatgagtgaacctgcttccttttttcttcatgcacatattaccgagagtaacctcaagaaatttttccattcaccggcaacaaatattaaagactatgacgactggttgccatggtttactgaggagcaaaggttgtacggcgatcctgcaaaaatgcttaacaatcttgccacatgtaattctggtgaaagtgaaaagaatatttatgctgaacatatcaactttaataaagaaacacagatagtcacgatggatcacatatttctctcagagagctatgaaatcttcatgccactcatggcctgtgtgcggggaatcgagaaatttattacgccaggggaaaataattttgcgctaatttattattactggtggggttcggagatcgccatcgcgctcgaatttgacgccaatggtagcagaataacggcaaatcctaaggcagaaaatttaactatcgccgatgcttttttcgatgaacacggggaagcactcgccgaagaactttataataaacagggttttatttgataccatttcgcggacttgtgaaatattgccggatgaaaacagctcatccggctcgttcaattactggtacaccggcaacaaattaaagctcgataaaatatgcaccagtgcgttcccgacgccaaatagcagaatcagtacaatcatcggtttaccgccccagacgcggaatttcgggctgccgaaacgttcgcgagatttacgtgccaacagcgcaggcacaatggccgcccagatagttgcagctaaacctgcatagccaatggcgtacagaaaaccgttcgggtacagcaggccaccaatcatcggcggcaggaaagtcagcagcgccgttttaaaacgtcccattgccgagtcatcaaaaccaaacagatccgccagatagtcaaacagccccagcgtcacgccaaggaaggaactggcgaccgcaaagttagagaacaccaccagcagcagatccaggctgcggctgttcagcacgccgctcaacgcctgtaccagcacatcaatattgccgcctttctgcgcaatgccgataaattccggacgcgggatgttgcccatcgtccccagcagccagacggaatagagcgctagtgccagtaacgtcccataaatcaggcatttgacgatggtacgcggatctttgccgtaatatttcatcaagctcggtacgttaccgtgataaccaaaagaggccagacaaaatggcagcgtcatcagcaggtacggcgtatatgacgcgtggctttcagccacgttaaacaacgtggcaggctgaacgtgccccaacaggctgccgaaggtcaggaagaaagtaatcactttcgcgcccagcacaatcgccgtcatccggctgaccgccttcgtactcagccacacgacaaacgccaccagcagcgcaaaggcaaaacctgccgctcgcgccggaacgttcagcgacatctcagcaaaggtatgatgcagaattgagccgctcgccgagatataggcgtaagtcaggatgtagagcacaaaggcaatagaaatgccgttgaccacgttccagcctttccccaacagatctttggtgatggtgtcgaaactcgaaccaatgcggtagttaaggttggcttcgagaatcatcagcccggagtgcagcatacaaaaccaggtaaagaccagcgccgccatcgaccagaagaaccacgccccggacatgaccaccggcagggagaacatccccgcgccaatgatggtgccgccgataatcaccacgccgccaagcagcgaaggtgacgtttgggtggtggtaagtgttgccattcagctctctctccagtcatttatagtgtgactatctctcaatacgctgcactgtaccagtacacgagtacaaaagaaataaaaaaagccccgattgtgacgatcggggctgtatattttactttacgctgtgaatgcgcaggtcagcgtgagttacgcatcaccgccgaaacgacggcgaccggtagagtcatcacgacgcggaccacggctttcacgacgttcgccgctgaagcgacgaccatcaccacgaccaccttcacgacgttcgccgctgaaattacgaccgccttcacgacgttcgccactgaagctacgaccaccgccgcgacgttcgccgcccgcgtgcggaaccgcatcacccaacagctgcatattcatcggcttgttcagaatgcgggtacgcgtgaagtgctggagcacttcgcccggcatacctttcggcagctcgatggtggagtgagacgcgaacagcttaatgttgccaatgtaacggctgctgatgtcgccttcgttagcgatagcgcccacgatatgacgaacttcaacgccgtcatcacggcccacttcaatgcggtataactgcatatcgccaacgtcacgacgttcacgacgcggacgttcttcacgatcgccacgcgggccacggtcattacgatcgcgcggaccacggtcgtcacggtcacggaattcacgcttaggacgcatcggcgcatccggcggcaggatcagcggacgctcgccctgcgccattttcagcagtgcggcggccagcgtttcgagatccagctcttcaccttcggcagacggctggattttcgccagcagcgcacggtactgatccagatcgctgctttccagttgctgctgaactttcgcggcgaatttttccagacggcgtttacccagcagttctgcgttcggcagttccacttccggaatggtcagcttcatggtgcgttcgatgttgcgcagcagacgacgctcgcggttctcaacgaacagcagcgcgcgaccggcgcgacccgcacggccggtacgaccgatacggtgaacgtaggactcggagtccatcggaatatcgtagttcaccaccaggctgatacgttcaacgtccagaccacgtgccgcaacgtcggtagcgatcaggatgtccagacgaccatctttcaggcgttccagagtctgctcacgcagcgcctggttcatatcgccattcaacgcggcgctgttgtagccgctacgttccagcgcttctgctacttccagggtcgcgtttttggtacgcacgaagataatcgccgcatcaaagtcttccgcttccaggaaacgcaccagcgcttcgtttttacgcatgccccagacagtccagtagctctggctgatgtcaggacgggtagtcacgctggactgaatgcgcacttcctgcggctctttcataaagcggcgggtaatgcgacgaatcgcttccggcatggtggcggagaacagagcggtctgatgaccttccgggatctgcgccataatagtttcaacgtcttcgatgaagcccatacgcagcatttcgtcggcttcatccagcaccagaccactcagtttagagaggtcgagggtgccgcgttttaagtgatcaagcagacgtcccggcgtaccgacaacgatctgcggcccctgacgcaggacgcgtaactgcacgtcataacgctgaccgccgtacaaggcaaccacgtttacgccgcgcatgtgtttagagaaatccgtcatggcttcggcaacctgtaccgccagttcgcgggttggcgccagcaccagaatctgaggtgccttcagctcaggatcaagattgttgagcagcggtaaagagaacgctgcggttttgccgctaccggtctgggccatgcccagcacgtcgcgaccgcccagcagatgcggaatgcactctgcctggattggagatggtttttcgtaacccagatcggtaagggcttcaaggataggagccttcagccccagatctgcaaaagtggtttcgaattcagccatgtagtacgtgtgcctcaaaattaatggcggccagtctacataactcatcatgaaattgatctgcaattttcattgaaaagtgtgaaccggctcaaagtaggtgtattaacgaacaacaacgccctcacccgcgaaggtgatggcaatcaaaaagattacgggctgatatgttcgtcagctattgctggtccgattctgccaggtcatcttggtcctggcccaggagcgataattccaacaatgcgtatcggtgctcaacaaagttatgaacgttgttggccaccgccagtttgaacagagccgtggcgctgtccaaatcccccagacttaggtaatacttacctaaatagaagttggtttcactgagatgctcagcgagcgaggtgttatccgttgcgtccgccttgagcctttccatcagcgttgcttcgctaatgtcgcccaggtagaactcgacaatgttccatccccattgctctttatccgatttttcgaagcgtgcttttaacgcttctttcgcctgcttctcattaagcttctgctcaacaagatacagccacaggctgcggtaaggatcattgggatcgtcttgataaaacgccagcagatcatcttgcgctaacttatcacggccgccgtaatacaatgcgataccgcggtttaagtgcgcgtagttgtaagttggatcaagctctagtacagaatcaaacgcttcataggcagcatcaaaattgcctgcctgcgttaaataaatgcctaagtaattgaatacttcaggcatatccggtctgattgccagcgcttgtgaaaaatcatttcgcgctaatgccctcaaaccaagactatcatacaacactccgcgctcatataaaagctgtgcgcgttcgtcatcggttaaagcccgactggcaagaatctgttccatacgcgccagaatcacttcctgctgtaaagtcggttgcaatggtactgcgaggacttcacttttacgccaggcggaattactacatcctgcaagcgtaagtgctgtcgcaacgaaacaccagcgcaaaaaaggcttcatttcccactcccgaagacaacgattgaatgaacgtcctgttccccggtggctcaacaaggcgtccagccaggtctaaagccctccgcactgcggagggcaaaaggctaccttactcggcctgttcgctcgccggagcttccggcgcagccgcaggttgagactgctcggttgcttctttaatgctcagacgtacacggccctggcggtcaacttccagaaccttaaccgggacttcctgacccatctgcagatagtcggtcactttctctacacgtttatccgcgatttgagagatgtgaaccagaccttctttcccgccgccgatggcaacaaacgcgccaaagtcaacgatacgggtcactttaccattgtagatacggccgacttcgatctctgcggtgatctcttcgatacgacggatagcgtatttcgctttttcaccgtcggtcgccgcgatcttcacagtaccgtcatcttcgatttcgatggtggtgccggtctcttcagtcagcgcgcggatcacagaaccgcctttaccgatcacgtctttgatcttgtccgtgctgatcttgatggtatggatacgcggcgcaaattcagagatatcgccgcgcggcgcgttgatcgcctgttccatcacgcccaggatgtgcagacgcgcacctttagcctggttcaacgcaacctgcatgatctctttggtgataccttcaattttgatatccatctgcagcgcagagataccgtcgcgggaacccgccactttgaagtccatatcgcccaggtgatcttcgtcgcccagaatgtcagacagtacaacgtagttgtcgccttctttcaccagacccatagcgatacctgctacggcggctttaattggcacgccagcgtccatcagcgccagagaagcgccgcacacggaagccatagaagaagaaccgttggattcggtgatttcagacaccacgcgaacggtgtacgggaatttatccatgtccggcatcactgccagcacgccgcgcttcgccagacgaccgtgaccaatttcacgacgcttcggagaaccgaccatgccggtttcgcctacggagtacggagggaagttgtagtggaacaggaagctgtcagtacgctcgcccatcagttcatcaagcacctgcgcgtcacgggcagtacccagagttgcggtaaccagcgcctgcgtttcaccacgggtaaacagagcggaaccgtgagtacgcggcagtacgccagtgcgcacgtccagaccacggatcatgtctttttcacggccatcaatacgcggctcgcctgccagtacgcggctacgcaccacgtttttctcgatagcgtgcaggatttcgcccagctcgttagcatccagagtttcatcttctgcaataagctgctcgatggtttcggatttgattacgtcaacctgagcatagcgctcttgtttatcggtgatgcggtacgcgtcgctcagacgagattcagccagcgcagcaacacgcgcgttcaacgcgtcgttgacggcttccggctgccagtcccaacgcggtttaccggcttctttcaccagatcgttgatcgcctggataacaacctgctgctgctcgtgaccgaataccaccgcgcccagcatagtgtcttcgctcagcagttcagcttcggattccaccatcagcacagccgcttcggtaccggcaaccaccaggtccagcttgctttctttcagctcgtcctgggtcgggttcagcacgtactggtcattgatgtaacctacgcgcgccgcgccgattgggccgttgaacggaatgccggacagcgacagcgcagcggatgcgccgatcatcgccacgatatccgggttaacctgcgggttaacggaaacgacggtcgcgataacctgcacttcgttaacgaagccttccgggaacagcggacgaaccgggcggtcaatcagacgcgcgatcagggtttcgccttcgcttggacggccttcacgacggaagaagctgcccgggatacgaccagcagcgtaggtacgctcctgatagttaacggtcagtgggaagaagtcctggcctggcttggcttttttctggccgacaacggtaacgaatacggcggtgtcatccatgcttaccataacagcggcagtggcctgacgcgccatcatgccagtttccagcgtaacggtatgctgaccgtactggaatttacgaacgatcggattaagcaaaataatatcctttccaatttttgacggcataatacgcgccgtcgttaatacccgatcttctgcgcatcctcgcgactaatgacaaccctaaccctgatatgggtaaagcctctcattagccgcgcgaacctctgcaacggaagatcattcatagcaacaatacattagtttccagcgaattgctgccatctgctggaaaaaaggggccatgaaggccccctctttctgaaactcgaaagaattagcgacgcagacccagacgctcaatcagcgcggtgtagcgtgcaacatctttacgtttcaggtagtcgagcagtttacgacgctgagaaaccatacgcagcagaccacgacggctgtggtgatctttttttatgctctgcaaagtgaccctgcaggtggttaatctgtgcagtcaacagagcaacctgaacatcggtagaaccggtgtcgtttgcgtcacgaccgaactcagaaacgattttagctgtagcttcagtacttagagacattttaaaactccaaagtatttaagaatgagaggacgccgatctctaattcagcgatcccagtgtacgccgcgtaaactgttaaataatttacgcgacgttaagcggcggtattctactcgcagcgctctcttatcgcaagacgaagcgacattacgctgggtactctactaccagccgacgaggcgcgacacggccttcgtcgtcaatttcgcccataccgataaacttatcgtcttcaccttccgtcacacgaaccagtcccttcaacggcgcgcccgtggtacgaaccgggttgccatttttgaagtataccgaagatgttaacggcagattaacaacaggatagtccgaagctggactgtccattggcatcaataatggatcgagcaactgcgccgccggaacgccctgctgttccgcctgtgctaccagcgtctgcaaatgctccagcgtcaccatacgatccaccggatacttgctgaccgtcagacgacgcaggtacgttacgtgcgcgccacagcccagtttctcacctaaatcatcaataatggtacgaatataggtgcctttggagcaatgaacttccagctccagctcgttaccttcatggcgaataaacagcagctcatagacggtaatcgggcgggcttcgcgcggcacttcgataccctggcgggcatattcgtacagtttcttaccctgatacttcagcgccgaatacattgacggaatctgctcaatatcgccgcggaaagtctccagcgcgctcgcaagctgctcagcgctgaaagtcaccggacgctcctgcacgatttgaccatcggcgtcagaggtatccgtgcgctgccccagacgggcaataacacgatagcgtttgtcagaatccagcaggtactgcgaaaattttgtcgcttcgccgaggcaaatcggcaacatgccggtcgccagcgggtccagcgcgccggtatgcccggcgcggttggcattgtagatgcgcttaactttctgcagcacgtcattgctggacataccctgcggcttatccagcagcagaacgccgtgaatgtcgcggccacgacgacgaggacgactcatcagtcctccttgctgtcgtccgggttcacacgacgttcttcgtcatgtttcaccacgttagttaccaggttggacatacgcatcccttccaccagcgagttgtcgtagaagaaggtcagttccggcacgatgcgcagacgcatcgctttacccagcaagctgcggatgaaaccagacgcttcctgcaacgctttgatgcccgcttttactgcgtcttcatctttgtcgttcaaaaaggtgacaaacactttggcataggccaggtcacgggacatttcgacaccggagacggtagtcatcatgcccaggcgcgggtctttaatttcgcgctgcaggatgattgcgatctctttttgcatctcttgcgctacgcgctgagggcgaccaaattctttcgccataataaattctccagaataaagacaaaaaaggggccataagcccctttttaaatttcttgccgggtggcgcttcgcttacccggcctacgcctaatcatcttctaaggattttggattgcaacaaggcggcaagctcgtaaatccccgggagcatagataactatgtgaccggggtgagcgagcgcagccaacgccgttgcggcccaaaagacgacgaagattaagcgatggtacgttggatctcgataatttcgaatacttcaatcatatcgccaacgcgaacgtcgttgtagttcttcacgccgataccacattccatgccgttacggacttcgttaacgtcatctttgaagcggcgcagggattccagctcgccttcatagataaccacgttgtcgcgcagtacgcggattgggttatggcgtttaatcgtaccttcggtaaccatacagcccgcgatcgcgccgaatttcggcgatttgaacacatcgcgcacttcagccagaccgataatctgctgtttcagttccggagacagcataccgctcatcgccgctttcacttcgtcgatcaggttatagatgacggagtagtaacgcagatccaggctttcagattcgatcactttacgcgcagaggcatcggcacgaacgttgaagccaaccagaatggcgttggacgccgcagccagggtcgcgtcggtttcggtgataccacctacgccagaaccgatgatcttcactttcacttcgtcggtagacagtttcagcaaagagtcggagatcgcttccacagaaccctgtacgtcggccttcagcacgatgttcacttcgtgaacttcgccttcggtcatgttggcgaacatgttctcaagtttagatttctgctgacgcgccagtttaacttcacggaatttaccctgacgatacagagcaacttcacgcgctttcttctcgtcgcgaacgacggtcacttcgtcacccgcagccggaacgccggacaggccgaggatttccaccggaatggacggccccgcttccagcacttcctgacccagttcgttacgcatcgcacgcacgcggccgtattcgaagccacacagcacgatatcgcccttatgcagcgtaccttcgcgtaccagaacggtagccaccggaccacgacctttatccaggaaggattcgatcaccgcaccgctcgccatacctttacgaacggctttcagttccagaacttcggcctgcagcaggatagcgtccagcagttcgtcgataccggtgcccgctttcgcagacacgtgaacgaactggctctcgccgccccactcttccggcagaatgccgtactgggacagttcgttcttaacgcgatccggatcggcttccggcttatcgattttgttcaccgcaaccacgaccggcacacctgccgctttcgcgtgctggatagcttcgatagtctgcggcatcacgccatcgtctgccgctaccaccagaaccacgatatccgttgcctgggcgccgcgagcacgcatcgaggtaaacgcggcgtgacccggggtgtccaggaaggtgatcatcccgttgtcagtttcaacgtggtaagcaccgatgtgctgggtaatgccgcccgcttcgccagaggccactttcgtggaacgaatgtagtccagcagagaggttttaccgtggtcaacgtgacccatgatggtcacaaccggggcgcgcggttcagccgcagcgccggtatcacggtcgctcattaccgcttcttccagttcgttttcacgacgcaggataactttgtggcccatctcttcggcaaccagttgtgcggtttcctggtcgataacctggttgatggtggccatagcacccagcttcatcatcgctttgatgacctgagagcctttaaccgccatcttgttcgccagttcgccaacggtgatggtttcaccgatcaccacgtcgcggttaacggcctgagcgggcttctggaagccttgctgtaaagaagaccctttacgcttgccgcctttaccgccgcgaaccgcagcacgcgcttcttcgcgatcggctttggattcggcatgtttgccttttttcgccggacgcgctgcttttgcattacggccacgaccacgaccgccttctacttcacgatcgttttcgtcttcggcctggcgagcgtgctgagaagtggtgacatgatagtcactggtgtcttctactggctcaggcgttgcggtccatttgttttcttccgccatgcggcgagcttcttctgctacacgacgcgcttcttcttcgagtttgcgacgtgcttcttcttccgctttacgcttcagctctgcagcttcattctcacggcgggctttttcggcctgggcggttttggtcatatcgtcagtctgttgattgctcactttgtctttttccgcagcttcacgtttcgctttttcagcggcttcacgcttagcttgttctgcggcctcgcgttcagctttttgttgcgcctcgcgtttggcctgttcttctgcctcacgacgggcttgctcttccgcttcacgctgcgcctgctcttccgcggccaggcgttcagcctcttgcggatcgcgtttcacaaaggtgcgcttcttgcggacttcgatttgtaccgatttactttttccaccggtaccaggaatattcagggtgctgcgcgttttacgctgcagcgtcagtttatcgggaccagaaaccgcttcgcggttcaggtgcgccagtaaagtctgtttttcttgtgcggacacagagtcgtcagcagatttccggatacctgcatcagcaaactgctgtaccaggcgatccacggaaacctgtctctctgcggccagcgcttttagggttacatctgtcatgctgttccttcctgctacagtttattacgcttcgtcgccgaaccagcaaatattacgggcagccataatcagctcaccggctttttcgtcggtcaacccttcgatatcagccagatcatcaatgccctggtcggcgagatcttccagcgtacaaacaccacgagccgccagtttgaaagccatatcgcgatctaatccttccagattcagcagatcgtcagccggtttgttatcaccgaggcttgcttcctggtcctgcgccagagtggccagtgcgtttttagcacgctcgcgcagtgcttcaacggtcggctcatcaaggccgtcaatttccagcagttctttcattggcacataggccagttcctcaagcgtggagaaaccttcttctaccagaacggtcgcgaactcttcatcaatatcaagatatttagtaaaaatctcgatagcggcatgtgcttcagcctgatgtttagcctgcaagtcatcaacggtcattacgttgagttcccagccgctcaattgcgaagccaagcggacgttctgaccattacgtccgatcgcctgcgccagattaccggcttcaacggcgatatccatggtatgtttatcttcgtccaccacgatagacgcgacgtctgccggcgccatcgcattaatgacgaactgcgccgggttatcatcccacagcacgatatcaatacgctcaccgcccagttcggtagagaccgcctgaacgcgcgcgccgcgcatccccacgcaagcgccgaccggatcgatacgtttatcgttggttttcactgcgattttcgcacgagaacccggatcgcgagccgccgctttaatttcaatcacttcttcgccgatttccggcacttcgatgcggaacagttcgatcagcatttccggcttggaacgggtgacgaacagctgcgcgccacgcgcttccggtcgaacagcatacagcacgccgcgaatacggtcgccagggcggaagttttcgcgcggcagcatatcttcacgcagaatcaccgcttcagcgttaccggccatcccttcggatttaatttccagagagatattgtcgcggttcactttcttcaccacgccagtgacaatttcgccttcctggtcgcggaactgatcgacaaccatcgcccgttcagcttcacggaccttctgcacgataacctgtttcgcagtctgcgtggtgatacggtcaaaggtgacagattcaatctgatcttcaacatagtcgccgacattcaggctttcgtcttcaaaacgcgccgcttccagcgtaatttccttcgtcggcatggtcacttcttcaacgatcaaccaacggcggaaagtatcaaaatcaccgcttttacgatcgatttctacacgaacatcgatctcctgctcatattttttctttgttgctgtcgccagcgcactttccagcgcttcaaaaattttttcgcgtggcagcgctttttcgttggagacggcttcaacaacagccaaaatttctttgttcatcgcgggcttttcacctcatccagactgttaaaagtggggaaccaggttcgccttctggatattactcagcgcgaacacttcatctttgccttcgactgtgacggtaatcatttcaccgtccaccgctttgataatgccctgccacttgcgacggttctgtaccgccatgcgaagaaccagcgcgacttcttcaccctggaaacgcgcataatgatcggcagtgaacataggacggtcgagacccggtgacgagacttcaaggttgtaagccacggagataggatcttcaacgtccagcaccgcgcttacctggtggctcacatcagcacaatcatcaacattgatgccatcttcactatcaatatagatgcgcagtgtggatgtgcgaccgcgaataaattcgatgccgaccagctcgtagcctaaggcttcaactggcgctgtaatcatctctgttaatttttgctctaatgtggacaagcccacccccaagacataaaaaaagggcctaaagcccagttattctgtagtcagataacaaaaaaccccgataaatcggggctttagataactgaaccctataaccgcaacggcggtctggtgtaccttccgaaagaatttttttcaaatccagctacgaaggacataatcttcacagtatatttgaaaaagaactctaagggaaagtggttgcgggggccggatttgaaccgacgaccttcgggttatgagcccgacgagctaccaggctgctccaccccgcgcctgaaacgtggcaaattctactcgttttgggcaaaatttgcaaatactgctgggatttggtaccgaggacgggacgtaaaatctgcgcacagtatagtgacctggcatgagttatgtcaaccctattcccaatatgcagatgaatgaatatcactcttcgttatactcatcccacctctccggcttatacacgcatgtcacaacgttatttcagtaaaccttcactaaacgcttcctgtctctgctaaaagatgattaaatgaaaactcatttattttgcataaaaatgcactaaagcagaaaccgatctcattatcagtcaatcaagcagggttctattctatgacgacgattcttaagcatcttccagcaggtcaacgtattggtatcgctttttccggcggtctggacaccagcgccgcgctgctgtggatgcgacaaaaaggagctgtcccatatgcctatactgcgaatctgggacaaccggatgaggatgactatgacgccattcctcgtcgcgcaatggagtatggcgcagagaatgctcgcctgattgattgccgcaagcagttggttgcagaagggatcgcagcgattcagtgcggcgctttccataatacgactggcggactgacctatttcaataccacgccgctgggccgtgccgtaaccggcacgatgctggtcgccgcgatgaaagaagacggcgtgaatatctggggcgacggcagtacctataaaggcaacgatattgaacgtttctatcgttacggcctgctgacgaatgctgaattacagatttacaaaccgtggctggataccgactttatcgatgagctgggtggtcgccatgagatgtctgaatttatgattgcctgcggtttcgactataagatgtcagtcgaaaaagcctactccaccgactccaacatgctcggcgccacgcatgaagcgaaagatctggagtttcttaactccagcgtcaagatcgtcaacccgattatgggcgtgaagttctgggacgagagcgtgaagatcccggcagaagttgtgaccgtccgcttcgagcagggtcaccctgttgccctgaacggtaaaaccttcagcgatgatgttgagatgatgctggaagcgaaccgcatcggcggccgtcacggcctgggtatgagcgaccaaattgaaaaccgcatcattgaagcaaaaagccgcggtatttatgaagcccctgggatggcgctgctgcacatcgcttacgagcgtctgttgaccggtattcacaacgaagacaccattgaacagtatcattctcatggtcgtcagctgggtaaactgctgtatcagggccgctggttcgactcgcaggcgttgatgctgcgtgacggcctgcaacgttgggtcgccagccagattaccggtgaagtgacgctggaactgcgtcgcggcaacgactactccatcctgaacaccgtgtcagacaacctgacctataaggctgagcgtctgaccatggagaaaggcgagtccgtattctcaccggacgatcgtattggccagttgaccatgcgtaatctggacattaccgatacccgcgagaaactgttcggctacgcgaaagcgggtctgttaaccgcctcttccgcgaccggtctgccgcaggttgagaatctggaaaacaaaggcaaataagcccgcatcgttgatgcaacaggccgcgaaagcggccttttttgtgaatatcaccccaggttgatgcaaatggcggatttgccggttaatctaactggacaacatttcgcaccctgtcaaagcattgtgcagccatgtctttttcagtcatcattatatagtcaatgcccccgccaaaatccggcccagcgacagccagtaatgctgttgtagaatgaatttcttcatcccagctaaaaagctgtcgccaccttgtatcattttgattcagttcatcttccacactacgttggagaggaattgtccaccctcccagaagatcgccggaatagcaggcatcaactcgatacgggttgtcctgttcgtaatcacttaacgcgtcataccatgattcatacgctttctgctgcgtaacgcttaacccctcgcagactgacgaaacactgataacggaaagaggttccaggcactcaacctgtgtacacaattgccatggttcacgaaattcaatcttattgtaaaaagccagcaagtcatctggcacagctagcgtgcttaatgtatctacctcaacatcgtgccagaaaacaaagggctgccgatcttcccaggtaacatcgacaaagaagctcaataacccccgcctgggaagcagtggatcaaaccccgggagtaacgccaggtcactcaagtttagttgggcaacgaaagcaagcggaaaatcaaccaactgattctctatgcggatgtcaatttcggttaataaccgctgctgcactaaccgatacttttcctcgtcaaaatcttccgctggctgcccaagcagcttacgcccttcattgagcagctcataactcattttcatttcatgaacaaacctggcatttcgcgttttttcagctttcagctttagtacgcgagatgtggcattaaccgatttttttcgtataggccagctttgtcctaatggccagtcgggtagaccgcccaaccgcgatgcccccacctttactgtttccatatcccgcagacaacgtttaaatgcaatagcagcacgtgcctgttgcacgactttctcctgaatagcagagctcaaattggatgtgcgcaattcagcaatcaatccagcacgatcgaaaaataaactcattaatctcttccttagatattcggctcagtgcaaaggaagattagataaaactacttgagcaaaagatatggagggggataacagatacaagcatttcagattatagctgagcaactactggcttcaatgaacgaagatgatctcgtaatcggtggagtgaacctgacgcagggagatcaccagagaggacatacatgagtatgtatgtagggctatctcaacgtattgacggggccatgccagggacgcgtgtaagcgtgcttcaacctcctctctgagagcagtttcaacagacgaaaaaaaagacgcttttcagcgtctttctttcggaatattggtaccgaggacgggacttgaacccgtaagccctattgggcactaccacctcaaggtagcgtgtctaccaattccaccacctcggcacggatactgctattagcgcgggatatcgctggtcggctgggccggtgcagcaggttgagtctgctcggtcttcgccggcgcactcagattttcccactcgcttcctttattggttttgttgctattgatattacccaacaccagactgatgatgaagaacagcgtcgccaataccgccgtcattcgggtcatgaagttaccagaaccacttgaaccaaatagcgtagcggaagcgcctgctccgaaggaggctcccatatcagcgcctttaccttgctgcagcatgatcagacctacaaggccaattgccacaataaggaaaacaactaaaagagcttcgtacataatcaacctgttccttgcggagttgccgcgtaccaatgcttctaccaataaagcgggatttttactgtttcccactgaagcgggtgtgaatactaaccaaagcgaatgaccttcgcaagggcaatttaagcgcattgtatcaactgcggaaaaaaacagcaaaagcgttgttttttgcgggccgtaaggcggcaaccgccgcctttttagtcacttaaacgcttaaacggcttttaccgcatccgcgatacgatgggcgaatgccgtaacctgcgcttcatcctcgccttccaccatcacgcgaatcagcggttcggtaccggatttacgtagcagtacccgcccacgattgccgagcgtggcttctacgtccgccgttaccgctttcaccgcttcattttccagcggatcgccgctaccggcggtgtaacgcacgttaaccagaatctgcgggaacattttcataccgctgcacagatcgtgcagactcatatgattacgcaccatcgccgccagaacttgtagccccgctacaataccgtcgccagtggtcgttttatccaacagaataacgtgaccagagttttccgcgccgatgcgccagcctttttcctgcaatttttccagcacgtagcggtcgcccactttcgcccgggcaaacggaatgccaagctgcttgagcgccagctccagccccatattgctcatcagcgttcccaccgcgccgccgcgcagctgcccctggcgcagcccttcgcgcgcgatgatatacatgatctgatcgccatcgactttattgccttcatggtcaaccatgatgacccggtcgccgtcgccgtcaagcgcgatgccgaggtccgccttctccgccaacacgcgcgcctgcaacgcgcgcacgtcggtcgcgcccacttcttcgttaatgttgacgccgtttggctcacagccgatggcgataacggtcgcgcccagctcgcgcagcacattcggcgcgatatggtaggtagcgccgttggcgcaatccacaaccactttcaggccattgaggctcagttcgttcgggaaggtgcctttacagaactcaatatagcgtccggcggcatcgacgatgcggctcgctttacccagctcagcggagtctacgcaggtgatctctttttccatttcggcttcgatggcttcttccacatcgtcaggcagtttcgtaccgtcgatagagaagaatttaatgccgttatcatagaacgggttatgcgaagccgagataacgatacccgcctccgcgcggaaagtccgcgtcagataggcgacggctggcgttggcataggtccggtaaacgaggccgacagtcccgcagcggcaaggcccgcctccagcgcggactccagcatatagccggaaatacgcgtatctttaccgataatgattttacgcgagccatgacgcgccagcacttttccggcagcccaacccagtttaagcacgaaatcaggtgtaatgggggcattgcctacacgtccgcgaatcccatcggtaccgaaatatttacgattactcatagcgtttgtttccctttgcagacagagtggcttccaccacccgcatcgcctctacggtttctttgacgtcatggacgcgaatgatctgcgcgccctgcatcgcggcaattaccgcgcacgcaaggctgccgttcagacggtctgatggtcccacgttaagtaactgaccaaccatcgttttacgtgacatgcccaccagcagcggcaggttaaaatgatgaaactcacccagtcgcgccagtaaggtataattgtgagagagatttttaccgaaaccgaatcctgggtcgagcaacaatttctcttttgcgatgccggccttctcacaacgtgctatttgctcaataaagtagcgattcacctcggcaaagacatcgtcatatttcggcgcctcctgcatggttttagggttgccctgcatgtgcataagactgaccggcaagccggtttccgctgccgcttccaacgcgccgggttcggagagtgaacggacatcattgataatatgcgcgcccgcccttgccgcttcacggatcacctcgggtttagaggtatccacagaaatccacacttcaaaacgttgcgcgattgcttccagtaccggaataacgcgatccagctcttcttccacgctcacttctgccgcgcctggtcgcgttgattccccccccacatcaataattgtcgccccggcattcaccattaaattcgcatgtttcaccgcctcaatcagcgtgttatgcgcgccgccgtcggagaacgaatccggcgttacgttcaggatccccataacatgcggatgagtgagatcgagcgtggcgccctgagcgaagagtttcatggtcaaaatccctgttttatttatggtgagttaaaaaaaataaatatcctccggcatagccggaggtttttcagatgcgcctataaggctctcttaccagccgcgccctaacaggcgcatacgatctgacatttgcatcaaacttcgttacttacggcccgtaaacgggctgcccggatacgggatcgataattgctcacccattttatcctcttcaagctggtgctttatgtagtcctgtatcttcgccgtgttcttacccaccgtatcgacatagtaccctctgcaccagaactccctgttcctgtatttgaattttagatccccaaactgctcgtaaagcatcagactacttttacccttcagatatcccatgaaactcgacacactcatcttcggcgggatctccagaagcatgtgaatatgatctgcacaacattctgcttccagaattcgtacgtttttccattcacacaattttcttaatatgctgcctactgccctacgcttctctccatagaacgcttgtcttcggtatttgggcgcgaaaactatgtgatatttacagttccatcgggtgtgcgctaagctcttttcgtcccccattgggacccccttttgatttcttgttgaacttttgcagttgccagaccgcaagatgttttaacaaatcaaaaggggttttaataactggcttaaagctgaaagctttccggaacccccagcctagctgggggttttccatagacaagaaaaaccccggggcaagccccagggtttcggtgagcgctaaacataatgttgtaaaacaaatgcttatttgtcgcccagctgctctgacatcgtgttgcccgggttcggcgtgcgtggttcatcaaccggacgcggcgcctgaggcgtaccattgctgtcagagttattggtgccgtttggatcttcccagcccgcaggcggacgcacttcacgacgcgccatcaggtcatcaatctgcggcgcatcgatggtttcatatttcatcaacgcatctttcatcgcgtgcagaatatccatattgtcagtcaggatctgacgagcgcgattgtagttacgttcaatcagcgctttcacttcctggtcgatgatacgcgcagtttcatcagacatatgtttcgcttttgcgacgctacggccgaggaatacttcgccctcttcttccgcatacagcaacggaccgagtttctccgagaagccccactgggtgaccatgttacgcgccaggttagtcgcgactttaatgtcgttcgacgcgccggtggaaacatgctcaacgccgtagataatctcttccgccagacgaccgccgtacagcgtgctgatttggctttccagcttctgacggctggcgctgatcgcgtcgccttcaggcaggaagaaggtcacgcccagcgcacgaccgcgcgggataatcgtcactttgtgcaccggatcgtgttccggcaccaggcgaccgataatcgcgtggcccgcttcgtggtacgcggtcgactctttctgcgcttccgtcatcaccatggagcgacgttcggcgcccatcatgattttgtctttcgctttctcgaactcaaccatcgacacaacgcgcttgttaccacgagctgcaaacagcgccgcttcgttgaccaggttcgccaggtccgcaccggagaagcccggcgtaccgcgcgcaatgatcgccgcatcaatatccgtcgctaacggtacgcgacgcatatgcaccttcagaatctgctcacgaccgcgcacatccggcaggcctaccaccacctgacggtcaaaacggcctggacgcagcagcgccgggtccagaacgtccggacggttagttgcggcgataacgatgataccttcgttaccttcgaagccgtccatctcaaccagcatctggttcaacgtctgctcacgttcatcgtgaccgccgcccagaccagcgccacgctggcgacctacggcgtcgatttcatcgatgaagataatgcacggcgccgctttcttggcctgttcgaacatgtcacgcacacgagacgcgccgacaccgacgaacatttccacaaagtcagaaccggaaatcgtaaagaatggcaccttcgcttcacccgcaatggcttttgccagcagggttttaccggtacccggcgggccgaccatcaggacacctttcggaattttaccgcccagcttctggaaacggctcggttcacgcaggtattcaaccagttccgccacttcttctttcgcttcgtcacaacccgcgacgtcagcaaacgtggttttgatctgatcttccgtcagcatacgcgccttgctcttaccgaacgacatggcgcctttgccaccgccgccctgcatctgacgcatgaagaagatccagacgccgatcagcaacagcatcgggaaccaggaaatgaagatagaagccagcaggcttggctcttcaggtggttcgccaacaaccttgacgtttttagtcagcaggttatcaagcagcttcggatcattaatcggaatgtaagtcgtgtaacggttactatctttcttggtaacgttgatctcacgtccgttgatacgcgcttcgcgaacctggtcctgattgacctcttgcaggaaggtagagtaatccaccttacggccattagactcgctgggcccaaagctctggaatactgacatcagcacaacggcaatgaccagccagagtattaggtttttcgccatgtcactcaagggattaacctcttattacaactgtgttaaaaacagcgtcaggatactctatatccagtttctttcaaaccttacgtctgaaatctgccggttatcactttcgcccggtcgctacaatgtacacttcacgcgaacgcgcacgcgaagagtccggcttacgaactttaaccttcgtaaacagggagcgaatttcccttagatactcatcgaaaccttcgccctggaacaccttcactacaaaacttccgcctggcgccagcacatcgcggcacatctctaacgccagctccaccagatacatggcgcgggggatatccaccgccggtgttccgctcatgtttggtgccatatccgacatgacaacttgtactttactgtcacccacgcgttccagtaacgctttcatgacaagttcatcacgaaaatcgccctgaagaaagtccacaccaacgataggatccataggtaaaagatcacaagcgatgatgcggcctttgccgccaatctgcgtgaccacatactgtgaccagcctcctggcgcagcgccgagatcgactaccgtcattcccggcttaaaaagtttgtcactttgctgtatttcatcaagtttaaaccaggcacgggagcgtagcccctttttctgcgcctgttgaacatatttatcgctaaagtgttcctgaagccagcggcttgagctggcagaacgctttttacctgtcatttaactttcccgtcggggcagttcatcgtagccaatggcgtaaatttctacacgcctatttggcgatataagggagatggcggtagaatgacccgttttcaatcccaacgtaagcaaaaatatacgatgaatctgagtactaaacaaaaacagcacctaaaaggtctggcacatccgctcaagcctgttgttatgcttggcaataatggtttgaccgaaggggtactggccgagattgaacaagcgttagagcaccatgaacttatcaaggtgaaaatcgcctcggaagatcgcgaaacaaaaaccttgatcgtggacgctatcgtgcgcgaaaccggcgcctgtaacgtacaggtcatcggtaaaacgctggtgctgtatcgcccaactaaagagcgtaaaatctcgctgccgcgttaaggatatcctaaagtcgaacacaaaatctgtgtaaaacgaggggttttccacgagcaggagagcaaaatgccacgctctctccgttgataaaaggccgctatgcggcctttttcctttctttacaatacaccaacaatttgcgtattgagtactgcttaaaggtattccactttaagcacttcgtattccacatcgccgccaggcgttttgatcaccacgacgtcatcctgctctttgccgatcaggccgcgagcgattggcgagtttaccgaaatgagattttgcttaaaatccgcctcatcgtcgccaacaatgcggtaggtctgctcttcgtcggtgtccaggttcagcaccgtgacggtagcgccgaaaatcacgcgaccattgttcggcattttagtgacatcaatcacctgcgcattcgacagttttgcttcgatatctttaatgcgcccttcgcagaaaccctgctgttcgcgtgcagcatgatactccgcgttttcttttaaatcgccatgttcgcgcgcttcggcgatagcggcgatgatttcaggacggcgcacagatttcagaaaatccagctcttcgcgcagtttttcggctccgcgtaaggtcatcggaatagcttgcatttgttatacctcttgaacattcctgtagggggcaatgaactctaccccggctgctaagccagccccggcatatgccataccagggtcagaagcaaaaaaacaccaacccgggcgcgcagtcccaggtcagctacaatttcctctttgataaccattttaccctggagttccctatgggtcatcgtttactttttagggcgttgcgccgtagtatgacggcttgtttccagggtgttagcgcgagattatgcgattttccagatttatcatcggattgaccaccagtatagcgttcagcgttcaggccgcgaatattgacgaatacatcaaacagcttccggccggcgccaacctcgcgctgatggtgcaaaagattggcgcgcccgcgccggctattgattatcatagtcagcagatggcgcttcccgccagtacccaaaaggtgattaccgcgctggcggcgctgattcaactcggcccggatttccgttttacgaccacgctggagactaaaggcaacgtcgataacggcatcctgaaaggtgacgtaattgcgcgcttcggtggcgatccaacgctaaaacgtcaggatattcgcaatatggtcgcgacgctgaaaaagtccggcgtcacgcaaatcgacggcaatgtgcttatcgacacgtcgattttcgccagccacgataaagcgccaggctggccgtggaacgacctgacgcagtgtttcagcgcgcctcccgccgccgccattgttgaccgcaactgtttttctgtgtcgctttatagcgcgcaaaaaccaaacgatttagcctttattcgcgtggcctcttattatccggtaacgatgttcagccaggtacggactctaccgcgcggttcggcagacgcgcagtattgcgagctggatgttgtgcctggcgatttgaaccgttatacgcttaccggctgtttaccacagcgcgccgacccgctgccgctggcctttgctattcaggacggcgccagctacgcgggcgcgatcctcaagcaggaactgaaagaggccgggataacttaccgcggcacgctgctgcgccagacgcaggttaacgagcccggaacgatcgtcgccagtaaacagtcggcgccactgcacgatctgcttaagattatgctgaaaaagtcagacaacatgatcgccgatactgtttttcggatgattggtcatgtcaggtttaacgtgcctggcacctggcgggcgggatcggatgccgttcgccagatcctgcgccaacaggcgggaattgatatcggcaataccattattgccgacggttccggtctttctcgccataatctgatcgctcccgccacgatgatgcaggtgctgcaatatatcgcccaacacgataacgagctgaactttatctctatgctgccgctggcgggctatgatggttcattacaataccgcgccgggctgcatcaggcgggcgtagacggtaaggtttcagcgaaaaccggatcactgcagggcgtgtataatctggcgggctttattaccaccgcaagcgggcaacggatggcatttgtacaatatttgtccggctacgcggttccacctgccgatcagcgtaatcgccgaatcccgctggtacgcttcgagagtcggttgtataaggatatttatcagaataactgagtgcatttattgccggatggcggcgctaacgcgtcttatctggcctacaaagaacataataaaacgggccgcaaatgcggcccgttggcttttgtaggccggataagcgtaagcgccatccggctacgagattaacgtttgtagatgaactcgacgccttcttcgtcgtcttcatcccagtcgtcatcccagtcatcgtctgcgtcttcttccacttcagccagctgctggcgatgataatcgtcccacatgaactcgactttttccggctgttttgcttcttcagcctgcgcgatcggattctcgatgataaaggtcatcacatcccagcagagatctttcacccccagctgactggcagcggaaatcagatagtatttcccttcccagcccaacgcttcggcgatcgctttcgctttctcttccgcttcggttttatccatcagatcgatcttgttgaacactaaccagcgcggtttagccgccagatcctggctgtatttttccagttcgccaataatgatacgggcgttttccaccggatcggaaccgtcgatcggatcgatatcaatgaggtgcagcagtacgcggcaacgttcgaggtgcttcaggaagcgaatccccaggcctgcgccttccgccgcgccttcgatcaaccccggaatgtcggccaccacaaaactcttttcgctgtccatacgtaccacgcccaggctcggcaccagcgtggtaaacggatagtccgcgactttcggttttgctgccgataccgcacgaatgaacgttgatttaccagcgtttggcatccccagcatcccgacatccgccagcagcatcagttccagcagcaggtcgcgcttatcgcccggcgtaccattggttttctggcgcggcgtacggttaaccgaggatttaaaacgggtattgcctaacccatgccagccgcccttcgcgaccaacagacgctgaccgtgtttggtcatgtcgcccatcgtttcaccggttccctggtcgataacgcgcgtaccgaccggcactttgatggtcacgtctttaccgcgtttaccggtacagtcgcggctcgcgccattctgaccacgttcagcgcggaacgatttttcaaagcggtaatcgatcagcgtattcaggttttcatcggcttccatccagacgtcgccgccgtcgccgccatcaccgccgtccgggccgcctttcgggatatatttttcgcggcggaagctcacacagccattaccgccatcgcctgcaacgaccagaatcgatgcttcatcaacaaacttcattttattctccgtaaatcattcgcctgagcggggttgcgaaaccaccgtttcatgcttgcgtaaaccgccccaaatacgatgaccaatggcggaatacatcgcgcccgcaaccacgacaaacgcaccgagataacctaaaaggtttaacatcggtctggcgaagaaatcgggccaggccatagataaaagatctgaaaacagcagggtaaatagcggtgtaagcgtgattatcgcgctcacctgcgccgcctgccaacgcgccatcgcttccgccagggcgccatatcctaccagcgtatttagcccgcagaaaatcaaacaggcgagctgccagtcgctcagttgcgctatcaccatcggttttgccagcggcaagagcgctatcgtacataaagtgtacagtaaaaacaggatctgctgcgaggccagacgtcgcaataatactttttgcgccacgccatagctcacccacaccatcgccgcgcctacgccaaaaataacgccccaggtgtagtcggtcagtcgggtaaaaatctcgatcagactggtgttaaaaaacatcaccagcccgctcaataacatcagcgcgccaatcacctgcgtaccgcgcatcttttctttcagaataaagacgctggcgaccatcatgccaaccggcgagagctggccgataacctgcgacgcggttgggcttaaatattgcagggaagaactgaacaaaatgaaattaccgaacagtccgcaggtcgctatcgccaataacaccaaccagcgcggcttacgaaaaatacgcagcggcggcagctttctttttactgccagtatcgccccgaggccaatactggccattaagaagcggtagaagacaatggttgaaggctccatcacctccagcacttgcttcattgctattggcaacgctccccagcacatcgcggtagtgagcgctaaaagaatgccaatgcctgcctgctgcttcatgccgtgttccctgcaaagacccgttaacggcattcgcacagccacacgggtatattttagtcggccatcgaatgtaaaaagccccgcaacaggtgcggggctttcatccgttaccggaccacaaaaaacttactcagcaacgatgctgatgtatttacggtttttcgggcctttaacttcgaatttcactttaccgtctgctttagcaaacagagtgtggtcacgaccgcaaccaacgttggtgccagcgtggaatttagtaccacgttgacgaacgatgatgctgcctgccagaactgcttcaccgccaaagcgttttacgcccagacgtttagcttcagaatcgcgaccgttacgagtcgagccgccagcctttttatgtgccatttaatctgctcccctaatcttaagcgctgatgccggtaattttcacatcagtgaaccactgacgatggccctgctgcttacggtagtgtttacggcgacgaaacttaacgattttaactttctcgccacgaccgtgggcaacaacttcagctttgattacgccgccatcaacgaaaggaacgccgattttgacttcttcaccgtttgcgatcatcagaacttcagcgaactcgatagtttcgccagttgcgatgtccagcttttccaggcgaacggtctgaccttcgcttactcggtgttgtttaccaccactttggaaaaccgcgtacataaaaaactccgcttccgcgcacacctttcaatgattcagagcgcgctataaatattcacaatagggcgcgaatattacgcaaattgcacggctttgacaagtgctaccatcaatacatgaagaaaaaaaacacaacgcatacggtaacgtttatctgcggcgttttttcagtacaatcagggtatatttctaaccataaaccctacgttacctcattcagacatgggataatcggggcgataagcccggcttttgcgatgaatttagaaaaaatcaacgagttaaccgcgcaagatatggcgggtgtcaatgcgacaatccttgaacagcttaattccgacgttcaactgattaatcagctaggatattacattattagcggcggcggaaaacgcattcgtccgatgattgccgttcttgccgcgcgcgcggtgggttatcagggtaacgcgcacgtgactatcgccgctctgatcgagtttatccacacggcgacgctgctacatgatgatgtggtggatgaatccgatatgcgtcgcggcaaagcgacggcaaatgccgctttcggtaatgccgccagcgtgttggtcggcgactttatctatacccgcgccttccagatgatgaccagcctcggctcgttaaaagtgctggaagtgatgtcggaagcggtcaacgtgattgcagaaggcgaagtgctgcaattgatgaacgtgaatgacccggacattaccgaagaaaattacatgcgggtgatttacagtaaaacggcccgtctgttcgaagctgccgcccagtgctccggtattctcgctggttgtacgcctgagcaagagaaagggttgcaggactatggtcgctaccttggtacggctttccagctcattgacgatctgctggattacagtgccgacggcgagcatctcggtaaaaatgtgggtgatgacctcaatgagggcaaacctaccttaccgttgcttcacgccatgcgccacggtacgccagaacagtcagcgatgatccgtaccgctattgaacaaggtaatggccgtcatcttctggaaccggttctggaagcgatgaccacctgcggctcgctggaatggacgcgtcagcgagcggaagaagaagccgacaaagcgatatccgcgttgcagatattgccggataccccatggcgtgaggcgctaatcggtctcgcacacatcgcggtgcagcgcgatcgttaatgccgttctcttatcccgcgtactgcgcgggatatcccattaagttctaataaactccagataccctatcgcctgtttttcacatactcatccaggatttcccctggcatattctgaatattgccgccacttacatgaactttttagaacattccttcacgaagcgttatagtatcgaacgtcgtcgggttgttaaaaccgtaagtgattaatctaaggagtgatggatgtatggaaagcaagcttattgactggcatccggccgatatcattgccggactacgtaaaaaggggacttcaatggccgctgagtcacgtcggaatggattgagttcatccacgctggccaatgcattaacgcgcccatggccgaaaggagagttgattatcgcgaaagcattgggaacggaaccctgggttatttggccatcgcgttatcacgatccgcgcacgcatgagtttatcgacagaacgcggcttatgagagcgcgtaataaaaacaaacagaatgtagagtaagtgcctgtaaaacaacccccgcatcgcgttcgcgggggttgttcagcgtacagaaggttattcgcctttcacgcgttcaatattcgcgcctagcgcgcgcagtttgtcttcgatgcgctcataaccgcgatcgatgtgataaatgcgatccacaatcgtcgtgccttccgcaatacagcccgccagcaccaggctcgcagatgcccgcagatctgtcgccatgacctgggcgccagagagcgtttctacgccatggcatatgacggtattgctttcaatttccgcacgcgcgcccatgcggctgagttcaggcacgtgcataaagcggttttcaaagacggtttcagtgataaagcccgtcccttccgccaccaggttcagcaacgtgaactgcgcctgcatatcggtcgggaatgccgggtgcggcgcggtacggacattgaccgccttcggtcgtttgccgtgcatgtccagactaatccagtcctcgcccacttcgatatccgcgccagcatcgcgcagtttcgccagtaccgcgtccagagtgtccggttgcgcgttacggcagaggattttgccgcgagagatcgctgccgccaccaggaaagtccccgtttcgatacgatccggcagcacacgataaacgccgccgcccagacgctctacaccctcgatcgtaatacgatcggtgccctgcccggcgatcttcgcccccagcgtaaccaggaagttagcggtgtcgacaatttccggctcgcgcgcggcgttttcaatgatggtcgtcccttccgccagcgtagcggcgcacataatggtgacggtcgcgccgacgctgaccttatccatcacgatatgcgcccctttaagacgcccttctacggaggcctttacgtagccctcttccagcttgatggtcgcacccagttgttccagaccggtaatatgcagatcaaccggacgcgcgccgatagtacagccccccggcagagagacttgtccctgaccaaaacgggcaaccagcggccccagcgcccatatcgaggcgcgcatggtcttaaccagatcataaggcgcgcagaacacgttcacctggctggcgtcaatgtgtaccgatccattgcgttccactttcgcgcctaattggctcaggagcttcatcgacgtatccacgtctttcagttttggaacgttttggatctctaccggttcttctgccagcagagcggcgaacaggatcggcagcgcggcgtttttggcgccggaaattgtgacttcgccctggagcgtcgttggcccctgtacacgaaatttatccattattgtattctcagttaagcattcatctccgctaccggcaggttacccgtagcttaaaatccgttaagtttacgatcgcgcgcccattccgccggggtatatgctttgatcgatacggcatggatacggttgtccgcaatgtactccattagcggcccatagaccgtttgctgtttcttgacccggctcatgccgtcaaacatctcgcccacggcaataacctgaaagtgactgccatcgccggagacgtggacttcctggagggagagggcattcatcagcacactctgaatttcatgattttccatgggttctttattcgtcaaatagtgaaaacagcccaacatcttagagcaaagtcgcgccgtcttaaataagcaaaagattacgctgataaatcagcgcggtaaaagtgccggatggtgctgctaacgcaacttatccggcctacggggatcatgcgaagtgtaggccggataaaccatccggcattcattacatacggggaagtacgtcttcgggcaagttatataattgcgccagcgcgtaaaccttgtcgttaacgccagacagcgacacggcattgccctgcttttttgcctggttcacaaggtgcgccagcagcgccagtccccccgtatctaccctggagatctggctcaggtcgatacgggtaacgccattcatcgcttctacgcgcgcgtcccatagcggcgccaacacgtcctgatccagctctcccgccagcaccagagtgtccgcctcacgcgtccaggtgagttgcggcgtcattactgtttctcgtccaaagtaattttctgttgagagatagatttcagttgtgcggtcaggccgtcgatgcctttagtacgcagcaggtcgctccactcattttgcttggtggtgatcatgctgacgccttccgcaatcatgtcatacgcctgccagttgccggtctgggtgttttttcgccactggaaatccaggcgtaccggcggacgaccgttgggatcgataatcgttacacggataggcacaatggtcgcatcgcccagcggttgctcaggcgctatctggtaagtctgaccgtggtacatcgccagcgcctgaccgtatgcctgtttcaggtattcgcgaaacgctgcaaaataggcttcacgctgcgccggggtcgcctctttgtagtagcggcccaacaccagcgcgccggcatattttacctgcacgtacggcagaagttcctgatcaacaacgtctcgcaggtaatccggattggcacgaattttcggctgttcgtttttcaggcgatcaaaagttttctgcgccgcctcgttcatcagtttataaggattgctctgatccgctgccgttgctgcgcttaatggcgcaatgaccagcagggccaccatcatcagtcgtttaaacatgcctcaattctcctgagattatttcgtttcgcccgcgggcgttgtggcttcagtatgaccttccgttgcggctggcgcatcgccagaattcttattgtcgtcgcctttgctgttataaaggaactggccaatcatatcttccagcaccattgcagacttggtgtcctgaatcgtactcccatctttgaggatagacgttcccagctcaggatcttcaaaaccgacgtttaatgccagatattgctcccccagcagtccggaagttcgaatactcaacgagctggtatcgggaatatggttataacgctcttcgatgtcgagcgttacgcgcggcaggtatgttttcggatcaagcgagatatcttcaacccgcccgacaaccaccccgccgatgcgtaccggggaacgcactttcagaccgccgatgttatcgaaggtcgcataaaccttataggtcggctccgtgcgcatagaggtcacatttgccgccttcaggcaaacaaacagcgccgccagcaacgctaccagcaaaaaaacgcctacccaaatttcattttttttcgtttgcatgaactcaattcccaaacatcagtgcggtcagcacaaaatccagccccagaacggccaacgatgcgtgaaccacggtacgcgtcgttgcccggctaatcccggcagaagtcggtattgcgtcataaccgttgaataacgcaatccatgttaccgtaatggcgaacaccacgctctttatcagacagttcaccaggtccatacgccagtcgacggcattctgcatcgcggaccagaagaacccggcgtcgattcccttccagcttacgccgaccagcgagccgccccagataccgaccgccacaaagataatggtcagtagcggcaatgaaatcacgcccgcccaaaagcgcggcgaaatcacccggcgcaatggatcgaccgccatcatctccatactggagagctgctccgtcgcccgcatcaggccgatttccgccgtcaacgccgacccggcccgcccggcaaacagcaacgccgcgaccaccggccccagctcgcgcagcagcgaaagcgccactaacatgccaagactggtctccgcgctgtaagtggtcagaaccagatagccttgcagccccagcaccataccgatgaatacgccggagacaataatgataagcattgacaagacgcccacattataaagctggcgcaccagcagcggcgcatgtttgcgaaactccggcttaccgataatcgcattgaataacattaacccggcgcgcccgaacgtcctgacggttttgatcccgctgtgtccgagtgctgccagcgcatttaacagcatgagtggcttaactccctgtttcgagtaaatcaaggtgatagtcgcccgccggatagcggaacggaaccggcccgtcggcaatgccgtcaaggaactgacgcacgcgcgggtccgtattctcctgcaacgcctgagcgctaccgtgagcgacgatttttttgtccgccatgatccaggcgtgatcagcaatactgagcacctctggcacatcatgcgagaccaccacgcaggtcacgcccagcgcgctgttcaattctgaaatcagcttcaccagaacgcccatggtaatcgggtcctggccgacaaacggctcatcgaacatgatgagatccggttccagagcgatggcgcgcgccaacgcggcgcggcgcgccatcccaccggagagctcggaaggcatcagttttgccgcgccgcgcagcccgacagcttccagtttcatcatcacgacgctttttagcagcggcgcgggtaaattggtgtgctcccgtagcggataggccacattgtcaaacacgttcatgtcggtaaacagcgctcccgactgaaacagcatactcatacgtttgcggacggtgtagagccgcgaacgggacatggccggcacattctcgccatcaaataagatctcgcccttatccggcgggatctgtccgccaatcaggcgcaacagcgtggttttaccgatgcccgacggccccatgatcgccgtgatcttcccgcgcggcaccgtcagggaaatattatcgaaaatgcagcgttcgccacgggaaaagctgacgtcgcgcatatcgactaaattggccgcagactgacccattgattcatccttcgtattgccttgttgaggtaaccatggcgctgaatttaaccatgggttcgacataattacagaatattaactgacagggttagcgaaagctggcattcgttttactttttagccgcataaagtcaaaattaggacttcgttacggcttccagatatcccttccaggggaccggcgagtatacctgaagaaaggactttagatgcttttagcgatggcgctactcataattggtttgcttctggtggcctacggcgccgatcgtctggtgtttgcggcctctattttatgccgtacattcggtattcccccgctgatcatcgggatgacggttgtgagtatcggcacctcgctgccggaaattattgtgtcggccgccgcatcgctacacggtcagctcgatttggccgtcggcgcggcgctcggttctaacatcaccaatattttgctgatcttagggctggcggcgctggttcgtccatttaccgtgcattccgatgttctacgtcgcgaattgccgttaatgttatttgttagcgtggtagccggttccgtactgcatgacggacagttaagccgcagtgatggtatctttctcctgcttctggctgtgctatggctgttattcattgttaaaatcgcgcgtctggccgaacgccaggggaatgacagcctcacccgcgaacaactggcggagctgccgcgcgaaggcgggctccccgtcgcgttcttatggctgggcattgcgctggtcatcatgccgatggcgacgcgcatggtaatcgataacgctacggtgctggcgaactatttcgccatgagtgaattaacgctcggtctgacagtcatcgccgtcggcaccagtctgccagagctggcgacggcgattgccggcgtgcgaaaaggcgaaaatgatattgccgttggtaatctcattggcgccaatatttttaatctcgctatcgtgctgggactgcctgcgctgatcgcgccgggggagatcaatccgctggcgtttgggcgtgattatagcgtgatgttgctggttagcgtggttttcgctttactttgctggcggcatccgcgtcagattggtcggggcgcaggtatactgctgaccggcgggtttatcgtatggctggcgatgctctattggctatcgccacttcttgttggataactggaaacggattatgtcgcatttagcgttgcaaccggggtttgactttcagcaggcaggcaaagaggtcctggaaattgaacgtgaaggcctggcggagcttgatcaatatatcaaccagcatttcacgctggcctgtgaaaaaatgttcaactgcaccggaaaagtggtggtcatggggatggggaaatccggccatatcggacggaaaatggccgccacgttcgccagtaccggcacctcttccttttttgtacatccgggcgaagccgcgcacggcgatttggggatggttacgccgcaggatgtggttatcgctatctccaactccggcgaatccagcgagatcgcggcgctaataccggtacttaaacgtctgcacgtgccgttaatttgcattaccgggcgaccggaaagcagcatggcgcgtgcggcagatgtgcatctgtgtgttaaagtgcccaaagaagcgtgtccgttaggactggcgcctaccagtagtaccaccgcaacgctggtgatgggcgacgcgctcgctgtggcgttgttaaaagcgcgcggctttaccgccgaggatttcgctctgtcgcatcctggcggcgcgctgggacgtaagctactgctgcgcgtaagcgatattatgcatactggcgatgagatcccgcatgttaataaacatgccaccctgcgtgatgcgctattagaaattacgcgtaaaaatctcggtatgaccgtcatttgcgatgaatccatgaagatcgacggtatcttcaccgacggcgatttacgtcgcgtattcgatatgggcggcgatatgcgccagttggggatcgccgaggtgatgacgccagggggcattcgcgtgcgtcccggtattctcgctgtcgatgcgctgaatttaatgcagtcccgccatatcacctccgtactggttgctgatggcgaccagttactcggtgtgttacatatgcatgatctcctgcgtgcaggcgtcgtgtagaaactcaaggataattaacgatgagtaaagcaggtgcgtcgcttccgacctgttatggccccgtcagcccccatgtcatgaccaaagcggagaatatccgcctgctcatcctggacgtggatggcgtattgtctgacggcctgatttatatgggcaataacggcgaagagctgaaggctttcaacgttcgtgacggctatggtattcgctgtgctttgacctccaatatcgaggttgccattattaccggacgaaaggctaaacttgtagaagatcgctgcgccacgctggggattgtccatctttatcagggacagtcgaataagttgatcgcctttagcgatctgctggaaaaactggccattgcgccggaaaatgttgcctatgtcggcgatgatctgattgactggccagtgatggaaaaagtggggttaagcgttgccgttgcggatgcgcatccactgctgatcccccgcgctgactatgtgacgcacattgccggcgggcgcggcgcggtacgtgaggtgtgcgatttgctgctgctggcgcagggcaagctggatgaggccaaagggcaatcgatatgagtaaaaccagacgttgggttatcattctactgtcgctggccattctggtactgattggtatcaatctggcggataaagacgatcctgctgccgtgatggtcaacagcaacgatcccacgtataaaagcgagcatacggataccgtcgtgtacagtccggaaggcgcgttgagctatcgtctgatcgcgcagcacgttgaatatttttccgatcaggcggtctcatggtttacgcaaccggtattaaccacctttgataaggataaagtgccgacatggtcgatcaaggccgataaagccaaattgactaacgatcggatgctctatctgtatggccatgttgaagtcaacgccctggtgcctgacgctcaattacgcagaattaccaccgataacgcgcagattaatctggtgacgcaggatgttacctcgaacgatctggtgacgttatacggcacaacatttaactccagcggactgaaaatgcgcggtaacttacgcagcaagaacgccgagctgattgaaaaggttagaacctcttatgaaattcaaaacaaacaaactcagccttaatcttatgcttgccggctcgctgctggccgccagcattccggctttcgccgtcacgggcgataccgaacagcctattcatattgactcggatcaacagtcgctggatatgcaaggcaacgtcgtgacctttacgggcaacgtggtgatgacccagggcacgattaagatcaacgccgataaagtcgtggttacccgccctggcggcgaacaggggaaagaggtgatcgacggttacggcaatccggccaccttctaccagatgcaggacaacggtaagccggtgaaaggccacgcttcccatatgcactacgagctggcgaaagattttgtggtgctgaccggcaacgcttatctggagcagcttgacagcaacattaccggcgacaaaatcacctacctggtgaaagagcagaaaatgcaggccttcagcgagaaaggcaaacgcgtcaccaccgttctggtgccgtcgcagttgcaagacaaaaacaaaggccagactccggcgcaaaagaagagtaactaattcgttatggcaacattaactgcaaagaatctggcgaaggcctataaaggccgtcgcgtagtggaagatgtcagtctgaccgttaactccggggagattgtcgggctgctcggtccaaacggcgcgggtaaaaccaccaccttttatatggtcgtcggtatcgtgccgcgtgacgcaggcaatatcatcatcgatgatgaagatatcagtctgctgccgctgcacgcgcgcgcgcgccgcggtatcggctatttgccgcaggaagcctctattttccgccgtctcagcgtatttgataacctgatggcggtactgcaaattcgtgacgatttgaccgcagaacagcgagaagaccgcgccaacgagctgatggaagagtttcatatcgagcatctgcgcgacagcatgggacaggcgctgtccggtggtgaacgccgtcgtgtagaaatagcccgcgcgttggccgctaatcccaaatttatcctgctggatgaaccctttgccggcgttgacccgatttccgttatcgacatcaaacgcattatcgagcatctgcgcgatagcgggctcggcgtgctgatcaccgatcataacgtccgtgagacgctggcagtctgtgaacgcgcctatatcgtgagccagggccaccttattgcccacggtacgccgacagaaatcctgcaagacgaacacgttaagcgtgtatatcttggggaagacttcagactctgatagggtagagggctatgctgctctagcgggagaaaacgactctgaatatgaagcaaggtttgcaactcaggcttagccaacaactggcaatgacgcctcagctacaacaggccatccgtctgttgcagttgtctacgctggaacttcagcaggaactccagcaagcgctggaaaataacccgctgcttgagcaaaccgatcttcatgacgaaatcgacacccagcaacctcaggataacgatcctctcgataccgccgacgcgctcgaacaaaaagagatgccggaagagctgccgcttgacgccagttgggatgaaatttacaccgccgggacgccgtccggccccagcggcgattatatcgacgatgagctgcccgtctatcagggcgaaacgacgcagtcgttgcaggattatctgatgtggcaggttgagctaacgcccttctcggataccgatcgcgctattgcgacatccattgtcgacgcggtagatgataccggctatctcaccgtatccctggacgaaattcgcgaaagcatgggcgatgtagaggtggatctcgatgaggttgaagccgttctgaagcgcattcagcgttttgatccggtaggcgtcgcggcaaaagatcttcgcgactgtctgctgatccagctttcacaattcgacaaatccacgccgtggctggaagaggcgcggctcattatctgcgatcatcttgatctgctggccaaccacgatttccgcacgttgatgcgcgttacccgactaaaagaagaggtgctgaaagaggcggtaaacctgattcagtcgctcgatcccagacccggtcaatcgatccagaccggcgagccggagtacgttatcccggatgtgctggtacgcaagcataacggtcgctggacggtggagcttaatagcgacagtattccccgtttacagattaaccagcactatgccgccatgtgcaatagcgcgcgcaacgatgccgacagccagttcatccgcagtaatttacaggatgcgaaatggctgataaaaagccttgaaagccgtaacgacacgctgctgcgcgtcagtcgctgcatcgtcgagcaacagcaagccttttttgaacagggcgaagaatatatgaaaccgatggtactggcggatatcgcccaggccgtcgagatgcacgaatccaccatatcccgcgtgaccacgcagaagtatctgcacagcccgcgcggtatttttgaactcaaatatttcttttccagccacgtcaataccgaaggcggaggcgaagcctcttccaccgcgattcgcgcgctggtgaagaagttaattgcggcggaaaaccccgcgaaaccactgagcgacagcaagttaacctctctgctgtcagaacaaggtatcatggtggcgcgccgcactgttgcgaagtaccgagagtctttatccattccgccgtcaaaccaacgcaaacagctggtttgacccaaccgataaggaagacactatgcagctcaatatcaccggacataatgtcgaaattactgaagccctgcgtgaatttgtgacgacaaaattcgccaaacttgaacagtattttgagcggattaatcaggtatacgtggtgttgaaagtggagaaggtcacgcacatctcggatgcgacgctacacgttaacggcggcgaaattcacgccagcgcggaaggccaagatatgtatgccgccattgacggcttgattgataaactggcaaggcagttaaccaggcataaagataaactgaaacaacactaattgtccgggcagttagccagtgcaggacggcctgttgtgtgacacaacgggccatttgtacagttagcgctccgaacctggccatcaacctgacaggacaggttcttaggtgaaattatgataaataacgatacgactctacaactgagcagtgtacttaaccaggagtgtacgcgtagcggcgttcattgtcagagtaagaaacgcgcgctggaaatcatcagcgaactggcggcaaaacagctcagtttacctcctcaggtcgtgtttgaagccattctgacacgcgaaaaaatgggcagtaccggtattggtaatggtatcgccatcccgcacgggaaactggaagaagataccttacgcgccgtcggcgtgttcgttcagctcgaaacgccgatcgcgttcgacgccatcgataaccagccggtcgatctcctcttcgccctgctggtgcccgccgatcaaactaaaacgcatctgcacacgctgtcgctggtggcgaaacgtctggcggataaaacgatctgccgccgcctgcgcgcggcgctgaatgatgaagagctgtatcaaatcattactgacaccgaaggtgagcagaatgaggcataacaactcaatggcatttatttctgtcgttgtgaggagaaacggtacatggtactgatgatcgtcagcgggcgttccggatcaggtaaatctgtcgctctgcgcgcgctggaagatatgggattttactgcgtggataacctccccgtcgtgctgttgcccgatctggcgcgaacgctggccgatcgccagatttccgccgccgtcagcattgatgtgcgcaatatgcctgaatcacctgagatttttgaacaggcgatgaataatctgcctggtgctttctcgccgcaattgctgtttcttgatgccgaccgcaataccttgattcgccgctacagcgacacgcgccgtttgcatccgctttccagcaaaaatctttctttagagagtgcgatcgataaagagagtgacttgctggagccgttacgctcacgtgcggatctgatcgtcgacacttcagaaatgtccgtccatgagctggcggagatgctgcgtacccggctgttgggcaaacgcgagcgtgaactgacgatggtatttgagtccttcggctttaaacatggtatcccgattgatgcggactatgtgttcgatgtccgctttctgcccaacccgcactgggacccaaaactgcgccccatgaccgggcttgataagccggtagccgcgtttcttgaccgacacacagaagttcacaattttatctatcagactcgcagctatcttgagctatggttaccgatgctggagaccaacaaccgcagctaccttaccgtcgctatcggttgtaccggcgggaaacaccgttcggtgtatattgcagaacagctggcagactacttccgctcgcgcggtaaaaatgtccagtctcgccatcgcacgctggaaaaacgcaaaacatgaccgtaaagcaaactgttgaagtcaccaataagctgggcatgcatgcccggcctgccatgaagcttttcgaactgatgcagggttttgacgccgaggtgctattacgcaatgacgaaggcaccgaagcggaagcaaacagcgtcatcgcgctgttaatgctcgactccgccaaagggcgtcagattgaaattgaagccaccggcccgcaagaagttgaagcgctggcggcggttatcgcgctgttcaattccggctttgacgaagactaaacccccccctctataccctatttcccccaacgccgtcccggtatttgatgacagtcaccccaaaaccgggcgtgttacgcctgcctgcctcttgtcccgcagccccaccctttcgtaagatttgtacatttcgtgcgctttacctatgcataaaaacattaagaaaaccttaaaaaatttcgtttaggttttgtttaagttctttgtccatactaaatttatgtgaataaatttttccaggacttgccatgatcctcttatcgaaacagactccgctgggcgccggtcgacatcgtaaatgctatacgcatccggataatgcccggcgttgcataaaagtcatttacaaccgtgaccacggcggtgataaagagattcggcgtgaactgagctactatgcgcatctgtcccgctacctgacagactggagcgctatcccccgttattacggcacggtagaaaccgattgcggcaccggctatgtctacgacatgattaccgatttcaacggcgcgccctctattaccctgaccgagttcgccgcgcaatgtcgttatgaagaggatgtcgctgtcctgcggcggctactgaaaaaactgaaacgctacctgctggataaccatattgtgacgatgtcgctgaagccgcaaaacatcctgtgccagcgtatcagcgagtcagaagtggttccggtggtttgcgacaatctgggggaaagtacctttatcccgctggcaacctggtcaacatggtgctgtgaacgcaaactggagagagtgtggcagcggtttatcgcccagcctgcgctggccgttgccctggagagggacgcgcagccaaaagacaagaaacggctggcgcttacttctcacgaagcttaatggcctgtgcttatcaggcccggacgacacagatcgcaggccggataaggcgttcgcgccgccattcgacaaaattaattaagctggttgcgcgtcataaaagattccccacccagttggcgcatctggcgcataatccacgcctgccggctacgcacatagccggaaggcgcattcgccttatagcgaatcgggttaggcagcacagccgccagtaacgcggcttcagacagactcaagcgactggcaggtttatgaaaataccgttgtgccgcagcctccacgccgaaaataccatcgccaaactccgcgatattcagataaaccgtgaggatgcgctttttgctccagacagtttcaatgcccagcgttagcccggcctccagacctttgcgcacccaactgcgtccatcccataaaaagagatttttcgccgtttgctgcgaaagcgtagaggcgccgcgaatacggctctcattccgctcattatgcgccagcgctttttcaatcgccggaacatcaaagccccagtgctcagggaacttctggtcttccgccgcaattaccgccagccccatccacggcgagatatccgccatactgacccagtcagaatgcgccacataaccgaactctccgccgagccaggcgctaatctgccgttccgccatcaccgccgaaaaaggcaccggaaccacgctaaacagcgcaatgccgccgccccaaaagacggcgagcgcagcaaggatacgtaaaagtagacggcgcaaaaacgttaacggcgcgatgcgtcgtttgctcattccgccagaaccagcacgcgcgacactaatttatcaatgccgcttgccgcctgggcgatatcctgcgccagcatataggcaggggtggtcacgaccttgttatcctcgtccacaacgatatcatcaaccgggcaaggtacgtgttcggcgcccatctcttcaagtacttcagcggtatcaatatccgtccctattgtcagacgtagcgggaagtcaaagattttcggcaacattgcgggcgcgatacagatgaatcccagcggcttgccggactggtgcatggccttcgccagcgcgacgacatcgctatccacccggcattcgctcccctggctggcgaaattactcaggttcttcgccgcgccgaaaccaccaggcacaatgagcgcatccagctcctctggctgagcctgggacaggggacgaatatcgccccgcgtaatacgcgccgcctcaatcaggacgttacgcgtttccgccatcgcttcgccggtcaggtgattaataacatccgcttgtggtttatccggcgcgaagcagacagcctgcgcgccgctgcgggcaatggccagcagcgtcagaacggcctcatgaatttcggtgccgtcatagacgccgcatccgctgagcactacgccaatttttttcatggtgaacatcctcctgcaaccgactcaagcccattaataattttgattaaaatgctacgcttcacacatttaaatgattcatgtaacaaatcatttaggatttgctatcttaactgcgtgcggcctgaaaacaggactgcgcctttgacatcatcataataagcacggcgcagccacgatttccctggtgttggcgcagtattcgcgcaccccggtcaaaccggggtcattttttttccgcgtttgccacccaggctttcagcaccgcgacatcgtgctgccactcctgcttcatctcttcaatccattccgcgacattatcttcccaggcgggaagatccggcgactggatttgctggccaagttgttgcagatgacgcagccctaccgaaccggcggcgcctttaatcttatgcccttcctcaacaacgccttttttgtcacgcgccgttagattggactccagcacgcttaaatagccaggcatcattttttcaaacaccgcgagaccgtcggtgatcaatttaggcccaaccaactcgatgtattgttccagcatcgggatatccagcagcgcttgcgctttatcgctctcttcaggcgtcacggtactctcctctttatcggtggcatcccagaattttttaatcatcgcggttaaggccggcaccgacagcggcttactcagcacatcgtccataccagcgtccagatactcttttttatctttcagaacgttagccgtaagcgctaccagcggcggtaaatcttcccgcgtgtggcgacgggtcagttctctggcgatatccagacccgtcatatccggtagctgaatatccagtaagaccaggtcgtattctcccggcacgaacatctccagcgccgccttgccggtcatcgcgacatccacgctgttccccagtttttccagtaccgaacgcgccacgatcacgttcagttcaatatcttcgaccagcagaacatgcagcgcgggcagcggcatgtcgtcttcatcaaaggcgtcctccacctcttccgccaccgctggcgcatgaaccgttagcgtaaaggtcgatcctttgcccggcagactggaaacggtaatatcgccgcccatatttttcgccagccgacgggagaccgccagcccgataccggtccccgtcgccggtttgccgccgttactgtctttcacctgataatacatggcgaaaattttatcctgctcatcctgcggaatgccgatcccggaatcttccacttcaaagtgcagcatgtcgccttcatcatagcgcgcccgcaccgtcacctggccctgctgagtaaacttcaccgcattgctgatcaaattccataaaatctggcgcagacgcgttccgtcggtaatgactttgtgcggcaacggcagcgtcggctcaagcacaaaacgtagccctttttgctgcgcctgcaaaccggaaaggttttccagatcggccataaagctggtgaaatcaatgggttggttatcaagctgaaccttacgccgctccatcttatccatatcaatgatatcattgaaaatattgcctaacgtcacggcggagacatggattgtcttaaggtatttttcctgttcggcggtgagatcggtatccagcaggatgcggcttaaaccgacgatgccgttaagcggggtgcgcagctcatgactgatggtagagataaacgtggtcttgtcgcggctggcgcgctccagcgcgtcctgataacgcttacgttcggtaatatcacgaccaaatcccatcaggccatgacgtttaccgacacggtcgtaataaggcactttacgaatttcaaagcaggcctttcgtccgtccgggtaatccagccactgttcgtaggtcagggagacgttatggcggaatactttttcgtcggtttcaatgactttctccgccgcttcgggagagtacacatcttccggcttcaaatgcaccagctgtttttcgctcttgccggttagcaattccattgcgcggttacagccggaaaattctttatcctcattacgataaaaaaccaaatccggcgaggcgtccagaaaggagcgcagaaaagaggattgctgttctagctggatttgcgcttcttcacgctctttaatttctacttttagctgttcaaatgtctcttgcagctccgcttccgctttttcgcgatcggcaatttcctgattaagctgggcaatattgtccttcaactgtacgttaagcttgagatcgcgctcgcgcatctcctccagcttttgcaccagacgcgacagtcgctgccttgactcttccagttgttcaacaacaacggataagaaatagaccgcccagggcgtaattaacaggccaaaaaagatggaacgaataacgtcgatactttcaacctgaccatgcagcaccatggtcaccgccatctgcacgacaatcgccagcaccaccaatgccaacgccaggagcatggaaaagcgcaccagacccaatttcatcatcaggtcgacatagtattgcgccagcatacgaatttgcttcatagaggattccttcaccacaacttcgcacataatacccaattatgggaaccgcgttgaatattgtgcgaaatatgcgtagcgcccctcatcacgctacgctacaggtggtatccagggacgggccagcgcagagccctgtacgccatgctcattcaggtatttgtccagctcaaccatccccgtccagcgattctcgcaccacagcggggcaagcagcgtcggacggcgagcgctggctgaaattcggtgataaattacctccggcggcgtatgacgaatcatctcacctgccgttagcgtgtagtcgtccagttcgatgccgttcagccgccccgcttcccaggctttggccatcgtactgcctttcacaatatgcagcggatgcagtttaataccatcaacgcccgtctccaccacacgctccatggtttgcaggcattctgcctgcccttcgcccggcagccccacaatcagatgcgcacacactttcagcccgcgctcccgggcaatccgggtggtacgctgatagcaggcgaagtcatgcccgcggttaattcggcgcagggttttatcgtgtgcggtttgcaatcccagttccagccacacctcgtagccttgatctttatattcacacagtaaatctactactgcctgcgggacgcaatccggacgcgtaccgacgcataacccgacgatactggcctggctgaccgcctgttgatacatggaacgcagcacctgcacttctgcaaaggtgctggtgtaggcctggaaataggccagatagcgtttagcgcggttcaccagatgcgcctgatgcgcaagctgctcggcaatcgaatgatgctgctgcgcctcatcggcaaaagaggcgacattacagaaggtgcaaccgccacgcccgatggtgccgtcgcgattagggcagctaaaaccgccatgaagcgtcagcttatgaaccttttgcccataccgacgtaaaagatccccaccaaacatattgactaatttctgtaactgcataatctgatagaccgcctcttaaaaagaggccaaagcctgccatttttagtctcctttggcgatgacctggatcaatcgtcccggaaggcttttatccattgcataatcaagcaaaataaacgatatttcattcataatcccgctgatgatttttcctgatattcccctcttttttcagcgtttgctgggtcatcgataaaaacagtagcattcaatactgctcacgcttaaaacagcataaaatgccaagatttttgaaaaagcaaggtcagataatgcctggcgagcggctcttatagtgagacagatcacaggctttctgccgctccgtattagcagcccttctataaaaaaccttttaatttcaaaagattcaaaaagttatctgtgctacagcacacttttgcataaatcagtttgccatttgacctgggtgtggattcccgataagttggggatccgctggaagctttctggatgagccgtctgctcatcatatttatgcagtaattgagattccctcttaaccgtatttaccaatgcgcaaaggacacaaagagggcgaatgcgaggtaagcgtatgatgcgccagccccgtcgccatgctcttgctgtgcccgcgcgccgtcggttgggagagcgtcccgtagagcctggggaggttcactgatatgttgtacgataaatcccttgagaaggataactgtggtttcggcctgatcgcccacatagaaggcgaacctagccacaaggtagtgcgtaccgccatacacgcgctggcccggatgcagcaccgtggcgcgatccttgccgacggtaaaaccggcgacggttgcggcttgctgttacaaaaacctgaccgtttctttcgcatcgtggccgaagagcgcggctggcgcttagccaaaaactacgccgtcgggatgatatttttgaataaagatcctgaactggccgccgcgtcacgccatattgtcgaagaagaattacagcaggaaaccctgtcgattgtcggctggcgcgatgtgccaaccaatgaaggcgtgctcggtgaaatcgccctctcctccctgccgcgtattgagcagatttttgtcaacgctccggcgggctggcgtccgcgtgatatggagcgccgtctgtttatcgcccgccgacgcattgaaaaacgcctgcaggacgacaaagatttctacgtatgcagcctgtcgaacctggtcaacatttataaaggtctatgtatgccggcggatctgccgcgcttctacctggatcttgcggatctgcgtctggaatcggccatctgcctgttccaccagcgcttttccactaacaccgtgccgcgttggccgctggcgcagccgttccgctacctggcgcataacggcgagattaacactatcaccggcaaccgccagtgggcgcgcgcccgtacctataaattccagacgccgctgatcccggatttacagtccgctgcgccgtttgttaacgaaaccggttcggattccagctcgctggacaacatgctggaactgctgctggcaggcgggatggacatcatccgcgccatgcgcctgttggtaccgcccgcctggcagaacaaccccgatatggaccaggatctgcgcgccttctttgactttaactccatgcatatggagccgtgggacggtccggcaggcatcgtgatgtccgacgggcgcttcgccgcctgtaaccttgaccgtaacggcctgcgcccggcacgctatgtcattaccaaagataagctgatcacctgcgcctccgaagtcggtatctgggactatcagccggatgaagtggtcgagaaaggccgcgtcggcccaggcgagctgatggtgatcgacacccgcggcggacgtattctgcattccgcggaaaccgatgacgacctgaaaagccgccatccatataaagagtggatggagaaaaacgtccgccgcctggtgccgtttgaagagctgcctgatgaagaagtcggtagccgcgaactggacgatgacctgctcgccagctatcaaaaacagtttaactacagcgccgaagagctggactcggttatccgcgttttgggcgaaaacggccaggaagccgtcggttcaatgggcgacgataccccctttgccgtgctctccagccagccgcgtattatttacgactacttccgccagcagttcgcgcaggtcactaacccgcctatcgacccgctgcgtgaagcgcacgtcatgtcgctcgccaccagcatcggtcgcgaaatgaacgtcttctgcgaagcggaaggtcaggcccatcgcctgagttttaaatcgccaattctgctgtactccgatttcaaacagctcaccaccatgaaagaggagcattatcgcgctgaccgtctggatatcaccttcgacgtgaccgaaaccacactgaacgcgacggttaaggcgctgtgcgataaagcggaacagatggtgcgcaacggcaccgtgctgctggtcctctcggatcgcaatatcggtaagaatcgcctgccggtccccgcgccgatggcggtgggcgcggtgcaaacgcgtctggtagaacaaagcctgcgctgcgacgccaacatcatcgtagaaaccggaagcgcccgcgatccgcatcactttgcggtactgctcggctttggcgcaacggctatctatccgtacctggcctacgaaacgctggggcgtctgattgatacccaggccatcgccaaaaactaccgtaccgtgatgcagaactaccgtaacggcatcaacaaggggctgtacaagattatgtccaaaatgggcatttcgaccattgcctcttaccgctgctccaaactgtttgaagcggtcggactgcacgatgatgtggtaaacctgtgcttccagggcgtggtcagccgtatcggcggcgcgagctttgatgacttccagcaggatctgctgaatctctccaaacgcgcctggctggcgcgcaaacccattagcccgggcggcctgctgaagtacgtccacggcggcgaatatcacgcctataacccggatgtcgtgcgtaccctgcaacaggcggtacagagcggcgagtacagcgattatcaggaatacgccaaactggtcaatgagcgtccggcgtcaacgctgcgcgatctgctggcgatacatccagacggcgaggcggtgactatcgacgaggttgagcccgccagtgagctgtttaaacgctttgataccgcagccatgtctatcggcgcattaagtccggaagcgcacgaagcgctggcggaagcgatgaacagcctcggcggcaactccaactccggcgaaggcggcgaagacccggcgcgctatggcaccaataaagtgtcgcgcatcaagcaggtggcttccggccgctttggcgtgacgccagcctacctggtcaatgccgatgtgattcagattaaagtcgcgcagggcgcgaaaccgggcgaaggcggtcagttgccgggggataaagtcactccgtatatcgctaaactgcgctattcagtgccgggcgtgacgctgatctccccgccaccgcaccacgatatctactctatcgaggacttagcgcagctcattttcgatctcaagcaggtcaacccgaaggcgatgatctccgtgaagctggtatccgaaccgggcgtcggcaccatcgcgaccggcgtggcgaaagcctatgcggatctgatcactatcgccggctacgacggcggtaccggcgccagcccgctctcttcagtgaaatacgctggttgcccgtgggaactcggacttgttgaaacccagcaggcgctggtcgccaacggtctgcgtcacaagattcgtctgcaggtggacggcggtctgaaaaccggcgtcgacatcattaaagcggcgattctcggtgcggaaagtttcggcttcggcaccggcccgatggtggcgctgggctgtaaatacctgcgtatctgccacctgaataactgcgcaaccggcgtagcaactcaggatgacaagctgcgtaagaaccactatcacggcctgccgttcaaagtgactaactactttgaatttatcgcccgcgaagtgcgcgagctgatggcttcgcttggcgtgacccgcctggtggatttgattggccgcaccgacctgctgaaagagctggagggcttcaccgctaaacagcagaagctggcgctgtctcgtctactggaaaccgctgaacctcatccgggtaaagcgctgtactgcaccgagaataacccgccgtttgataacggcgtgctgaatgcgcaactgttgcagcaggcgaaaccgtttgtcgatgcgcgccagagcaaaaccttctggttcgacatccgcaacaccgatcgttccgtcggcgcgtcgctttccggctacatcgcacagacccacggcgatcaggggctggcttccgatccgattaaagcacacttcagcggtaccgcaggccagagctttggcgtgtggaacgcgggcggcgtagagttatatctgactggcgatgccaacgactatgtcggtaaaggtatggcaggcggtttgattgccatcagaccaccggtaggttccgccttcctcagtcataaagccagcattatcggcaacacctgcctgtatggagccaccggtggccgtctgtacgcggcgggccgcgcgggcgaacgtttcggcgtgcgtaactccggggcgattaccgtagtagagggcatcggcgacaacggctgtgaatacatgaccggcggcatcgtctgcgtgttgggtaaaaccggcgttaacttcggcgcggggatgaccggcggcttcgcctatgtgctggacgaagatggcgaattccgtaaacgcgtgaacccggaactggtagaagtactggacgttgattcgctggctatccacgaagagcatctgcgcggtctgatcaccgagcacgtgcagcatactggttcgcaacgcggcgaagagatcctgtccaggtggtcaagcttctcaacccaattcgcgttagttaagcccaagtccagcgatgtcaaagccctgttgggccaccgtagtcgtagtgcggcagaattgcgcgtgcaggcgcagtaaggaattgaaatgagccagaatgtttatcaatttatcgacctgcagcgcgttgatccgccgaagaaaccgctgaagatccgtaagatcgaatttgttgaaatctacgaaccgttttctgaaggtcaggcgaaagctcaggcggatcgctgtttgtcctgcggtaacccctactgcgagtggaaatgtccggtacataactacatcccgaactggctgaaactggctaacgaagggcgtatttttgaggcggctgagctatcgcaccagaccaacaccctgccggaagtgtgtggccgcgtctgcccgcaggaccgcctgtgcgaaggctcctgtacgctgcacgatgagttcggcgcagtgaccatcggtaacattgagcgctatatcaacgataaagcgttcgaaatgggctggcgcccggatatcaccggcgtgcgccagacggacaaacgggtagcgattatcggcgcaggtccggcagggctggcgtgcgccgacgtgctgacccgcaacggcgtgaaggcggtggtctttgatcgccatccggaaatcggcggcctgctgaccttcggtattccagctttcaaactggaaaaagaggtgatgacccgccgtcgcgagatcttcaccggcatgggtattgagttcaaacttaataccgaagtgggtcgtgatgtacagcttgaagatctgctgaaagattacgatgcggtattccttggcgtcggcacctatcagtcgatgcgcggcgggctggaaaatgaagatgcggacggggttttcgacgctttgccgttcctgatcgccaatacgaagcagatcatggggtttggcgaaaccagcgacgaaccatatgtcagcatggaaggcaaacgcgtggtggtgctgggcggcggcgataccgcaatggactgcgtacgcacttccatacgccagggcgcaacgcacgtaacctgtgcttatcgtcgtgatgaagagaacatgccgggttccagacgcgaagtgaagaacgcgcgcgaggaaggtgtcgaatttcagtttaacgttcaaccgctgggcattgaagtcaatgccaacggcaaagtgagcggcgtaaaaatggtgcgcactgaaatgggcgaaccggatgccaaaggccgtcggcgggcagagatcgtcgccggttccgagcatgtggttccagctgatgcggtggtgatggcatttggttttcgtccacacagcatggaatggctggcgaaacacagcgtggaactggactcgcagggacgaattatcgcgccggaacgcagcgataatgctttccagaccagcaacccgaaaatcttcgccggtggcgacatcgtgcgcggttccgatctggtggtgacggcgattgccgaaggccgtaaggcggctgacgggattatgaactacctcgaagtgtaacccttccggctccccgcttactgccttggctgatggctggggagccgatattcctctcctcaatatctctcctgccgattctggaaacccgctcgtaaatcgagatgtaatgccatgtaaaatccgctcatggattgatccgtttacgcctgaagcgtattgatagcgttctaatttcacaatgaaactatcacgtaagggatgacatgacgaatccaactttagcgccacagtctgatgaatatcagcaaatccataacggaattgttcaactgctggacacagcgcggacacaaaccgttcgcagcatcaacaccatcatgacagcaacctattgggaaatgggtcgacgcattgttgaatttgaacaaggcggtgaagccagagcggcttatggtgaacagctaattgatcgtttatcacaggatttaagccaaagatataaacgaggtttttctgccagtaatctatggcaatttaaaaagttttatctttattttcaaaaaattgagattctccagacagtgtctggagaatctctccatttggcgcaactggctaaatctttcccactcccctggtcggcgtatgtccgcctcttgtcggtaaaaaatcccaatgcccgcactttttacgagaaagagacgctacgtaacggctggtccgtacggcaactcgatcggcaaatcgccactcaattttacgaacgaacgctactgtcccacgacaaatccgccatgttgcagcagcctgcacccgccgagccaaacgttttgccggagcaagccatacgcgacccgttcattctggaatttcttaacctgaaggacgagtattccgaatcagacctcgaagacgcgctgctcagccacctgatggactttatgctggagctcggtgacgattttgcttttgttggccgccaacgccgactacgcatagacgatagctggttccgcgtcgacctgctgttcttccatcgtcgcttgcgctgcctgttgctcgttgacctgaaggtaggcaaattcggttatgcggatgccgggcagatgaatatgtacctgaactatgccaaagagcactggacaatgcccggagaaaacccgccagtcggcttagttttgtgcgcagggaaaggcgcgggggaagcacattacgcgctgactggcctgccaaacaccatcatggcgagcgagtacaaagtgcagttgcccgacgaaaaattactcacagacgaacttattcgttcgcaaaccatgctggaaactcaactcacacgcggtggttcactgacaacggagaaaaactaacgaaccattaatgccatgaataattatcaaaaaaaatatcacacgaaaacgtttgctttattctggaaactgtatattatgcggcggattttttgggcaaaattcatggaggcgttgtgtcgcaggacaacaattatagccagggccccgtccctctggctgcgcggaagggcgtgattccactgacgtttgtcatgttgggtttaacgtttttttccgccagtatgtggaccggagggacactcggcaccggtctttcttataatgatttcttcctcgcagttctcttcggtaatctcctcctcggtatctacactgcatttcttggttacatcggcgcaaaaaccggactctccacccacctccttgcacgttactcctttggcgttaaaggctcatggcttccctcgctactgctaggcggtactcaagtgggctggtttggcgttggcgtagcgatgttcgctattccggtcagtaaagcgacgggcattgatgccaatattctgattgccgtttcgggtctactgatgaccctgaccatttttttcggcatctcggcgctgaccattttgtctatcgttgccgtacccgcgatcgttattctgggcagctactccgtctggctggcggtcagcggcgtgggtgggctggagcatttaaaaacgatagtgccgcagacgccgctggatttttccagcgcgctggcgctggtggtgggctcgtttgtcagcgccggtacattgaccgccgacttcgtccgcttcgggcgtcatgccaaaagcgccgtactgattgcgatggtcgcttttttcctcggcaactcgctgatgtttatctttggcgcggcaggcgctgccgccgtcggtcaggcggatatctctgacgtgatgatagcgcaggggctgctgctgcccgcgattgtggtgcttggcctgaatatctggaccaccaacgataacgcgctgtacgcatcgggtctgggcttcgccaatattaccggtctttccagccgtacgctgtcggtggtgaacgggattatcggtaccgtgtgcgcgctgtggctttacaataattttgtcggctggctgacgttcctgtcatctgccatcccaccgattggcggagtgattattgccgactatctgttgaaccgccgccgctatgccgacttcaacaccgtgcgctttattcccgttaactggattgctattctttccgtcgcgctgggcatcgccgccggacattatgttccgggtattgtgcccgtcaacgccgtactcggcggcgtcttcagctatatcctgctgaatccacttttcaaccgcagccttgctaaatcaccagaggtcagccatgcagaacaataacatcaccattcgtcagacgcgtctgcagggacacgaaggattatggcagattacgattgaaaacgggcgctttagccggattgagcctcaggaagccgcatcgttaccgcagggcgaagtgcttgatgccgaaggcggtctggctattccaccgtttgttgagccacatatccacctggataccacgcaaacggcgggtgaaccgagctggaaccagtccggcacactgtttgaagggattgagcgctgggcagaacgtaaagcaatgctcacgcatgaagatgtgaaagcgcgcgcgatgcagaccctgaaatggcagatggctaacggcatccagtacgttcgtactcacgttgacgtttcagatcctacgctcaccgcgctgaaagccatgctggaagtgaagcaagaggttgcgccgtgggtagacctacaaatcgtcgcctttccgcaagaaggtgttctgtcttatcccaacggtgaagcgctgttagaggaagccgtgcgtttgggcgctgacgttattggcgccattccgcactttgagttcacgcgggaatatggcgttgaatcgctgcacaaaatctttgcactggcgcagaaatacgatcgcttgatcgatgtgcactgcgacgaaattgatgacgagcagtctcgctttgtcgaaacggtcgcggcgctggcgcatcgtgatagcatgggggcgcgcgtgaccgccagccacaccacggctatgcactcgtacaacggcgcgtatgcgtcacgcctgttccgcctgttgaaaatgtcggggattaacttcgtcgccaacccgctggtgaatattcatctgcaagggcggtttgacacttacccgaaacgtcgtggcgtcacgcgggtgaaagagatgctggaagcggggatcaatgtctgctttggccatgatgacgtcttcgacccgtggtatccattaggcaccgccaatatgctgcaggtgctgcatatggggttacacgtttgccagttgatggggtatgggcaaatcaacgacgggttaaatctgatcactatccacagcgcaaaaactttgcacctgcaggactacggtctgagcgtcggcaatgccgcgaatctggttatcttacccgctgagaatggattcgacgcggtacgtcgccagacgcctgcccgttactcgattcgccacgggcgggtaattgccgagacggtgccgagccagacgacgctgcacctgacccagccggaagccgtgacgtttaagcgttaacccgtcatacccgcgctctccggcacattcaccacgcagccccgtaaggggctgcgttcggaagactgctccggcaagagattcaggccgccagcagactggcgcgtactttcactaccactttcttgatgtcatccggctcacccactgcacatcccggtttatgcggttctcccggcataaacacagcaaacatccccgcttgcagcgtaatagtctgctcgtcgacaatttgactacaaagctggtaatcctcttcaacgtgcatctcctcgcactggcgagcggcaccggacatcccaaacgcaatacgctcgacgccggttagtagtagctgaatatcaatgtattgttcatgcaattccgctttcttctcggccggcatttgcgtcgttaactgcattacattcataaagacattgtcgccctgcaattcatagcgccccggcgctttctcctgcggccttgccgccagcgcgagagtcaaggcatccaacaatcgcggatgcaacccgcaagaaggcaacgactgtacttcccccatcatcataatgtgtctccttgagctaacaacgcagcgcctaataatcctgcgtcatgccgatagcgagcggcgctcagcgccacgtgataaggcgcaggctcttgcatcaaaaacgcgcgaacctgctccaggtatccctcagctaaccctacgctgccgccaatgaccacacactggcagtcggtagtcgctttcacatcggcgatcattcgcgctattacctgcgcggattggcttaccagatgtcgcgcctgctgatgaccttcgccagcgcgaataaatagggttttggcgtcgcatcccgccagatcgtcccgcgccgccgcggccatccctcgtccggaggcgatggcctctacacaaccaacgcgtccacagccgcatacgggcccgtgtgggtccgccagggtgtgtcccaggtgcccggccagaccgccttttccggtaaggagcttgccgtcgcagacaacgccgccgccaacgccggttgaaacggtgataaataccatatcgcggatatcatcagggagcgcgtgatactccgcccaggccgccgcctgcgcgtcgttcaccgccagcgtcggcaggccagcgatcgcttccagtgtttgtactaacggaaagtgtagcaagccgcccagattatgggggtttagcgccagcagcatcccttcctgaatgatcccggtagaagctatcgctacctgacgcgcctctgctcgtagtggttcaaccagcgcctttaatgcttcacgtaacgcatccggcgttttgctcgcgggggtcggtagctcgcgacgctggctaatgcgcaagttgttgtcgatgagcgcggcggcaagtttagtaccgccaatatcgattgctaacgtagtcatgacgccgccttttttaatgcgtcgttataccatccacagatatgttccagacgggtaatggcggaccccaccgtcaccgcccatgcgccatagcggatcgcctccgccgccagtgctggcgagttatagcgcccttcggctattacccggcatccggcgtcatgcaacgctttgactaagggcagatcgggttcctccggcgtatcgggggtggtgtagccggacattgtcgtgccgataatgtccgcgcccaaccgttggcaggcgagaccatcgtccacggatgagcagtcggccatcgccagtagatggtggtgatgaatgcgcgccaacaacgcctcaacggctaccggccgttgccgagcggttccatcaacggcgataatagctgcgccggcctgcgccagcgcatctacatcgtcgagaaaaggggtaatgcgcactggagactcatccagatcgcgtttgataatgccgataatgggtaccgaaacgagcgagcgggtcatacgcaggttgtctatgccttcaatacgcaccgcaaccgcgcccgcctgttccgctgccaacgccattgccgctacaatctccggcttatccagcgggctgcccggaacgggctggcaggagacaatcaggccgccagaagcggcaatatttttatccagttgttcaagtaacgacatactactcccttacaaatattgcccggttgaaaaccgggcaagcggattaacttttcgtttttacaaaggcacctttaccactgccaagcggtacggctccgctgaacggtttgtcgtcgatagcatcatgggtgcgtaacgcttccggacgtagccaacgctgtacgcgagacggcatatcaagcccaataagcaggatcacgacaaacgtcaggctgaaagagagcgatgccagcgcagtgcccagatccagacgttgagcgatcagcgctcccaggatcggcgccagcgcgccgccgagcgcgccgacgttataagtaaagcccagccccgccgcgcgctgatcggtatcgaagtaaccgccgatcagtttcggcagaatcccggcaatcccctgccccaacatctgttggaaaaacagtagcagacccagaacccagacgtttgtgccgccaatcgcaaagaccggaataatgaggatttgcgaggccagcaggctacagacatatgctttacgcgttcccagccagtcgccaagaaaaccgcctacgcagcaaccaaccgccgcgccaaatccgctaaagaacaggacattcgccaccgtatgcggatcgtaggccagctcggttttcagataagtgggtaatagcgcctgaatcggccaggaatagaggaaagcaaacagtaccaccagcatcagcatgacgccagtgggccagcgtttaccgctgctctgcaccataaagctgataaagataaccgcgcacagtagtcccagccccgccacaatcgcagcattttgtaggttaccggcaaaacagaaccacagcgcagcggcggcggcgaaagtcattaaaatgttgatgatgcgatgttcgccccgataaagaatgtcgaccatcgtacgtaccggcgctttacccgcgtgtttctctttccagtcttccgcttccggaatgtttttccgcagccagagagcgaagataattggcaaaatgccaatgaaaaacagcgcgcgccagccccagacaggcaccaccaggctgtacacctgcgcggcaacgaccgcgccgacggagaagccggaaatcagaaaaccgctggctttattgcgtaaatgttttggccagctttcaatcacataggtcgcgctggaaccatattcgcccgccatgcccataccaatcaccagtcgggcgatgaacatggtggtgtaaccgggcgcaaacccgcatgccagggttcccaccgaaaacagaatgatgctgctgaccatcgccagacgacgcccatagcgatcgcccatcgcgcccagtaataacccgccgaaccagcgagagataaaagccgcagaaatcaggcttgccgcctgtaccgtcgtcagcccaaattcgctttgtacctcagtcagtacaagagcaatcaacacaaaatcaaaaccatcaagcagatatcccagccaggcagcggaaaatgcccgccactgcgcccggttgagatggcgataccacgggatgttctgggtagaagtactcattttactctcccgacgatttttgttgtcgttatgccgaatggcggctccgccttatccggcctaccgctcacactgttgtaggccgggcaagcgtagcgcccccggcattatgctgttacgccttttcttccatcagttgttgagccagcgccttgagcgccggcaggtatttttcatcaacaggcgcgaacggtttacgacacagcggcaccgataccacgtccatataatgcaggaccgttttcaggccgcggaatacgccggttttaatcagtaaatcaataaccttattgcactcggtttgcagacgctgcgctttcgccacatcgccctcacgtaatgcctgcacaatcccctggtaacgccagcccataatgttgtatgtgctgccgataccgccgtccgcgcccgccagcaggccggaagcgaagatttcgtcataaccgttgtacagcaccagatccggatgcgcgcggcggatctgctccatctggaagagatcgccggaggtttgcttcagcgcgctcacgcccggtaatgtcaccagcgtattgatctgatcgagggtaagttttacaccgcttaacgccggaatgttgtataccaccatcggcaatccatctgcggaatcaatgattgcccgataatggtcacagtgctcttcaaaactgaaagggtaataaaaaggcgtcaccgcagagaccgcatcaaaaccgtaacgctttgcggcgctggcaagctgctggctttctgcggtgcttactgtcccgacatgggcgatcaacgtgatttttcccttcgcctcttcggcgacaatctccagtacctgctctctttcagcaaggctctgtacgaatgcttccccggtggaaccgccaacgtacagcccgtcgataccctgcccgatgttaaaacgcaccagacggcgcaggctttcgctatccagttgctgctgatgatcaaatggggtcaacaacgccaccattacgccttgcaatgcttttgccatacctacctctacggatgatgaatatattaactacctacctttatacctgttataccagatcaaataagcagcaaataatacagaacgcttatagtgcgatctgcttcactaaaccgggatcggaggtgcgatcgctaccgcattttttgactttttttaccgagcgcgtgccaggtagcggaaacgctattgaggtgggtttgcagagcgcgatccgctttatcgggatctcgctggcgaatggcatcaacaatcacaatatgttgttgataactcacgttattatgttcatgcagctcacgatcgggaacgcttgggcgagcggcgattagccagtccagcagagcaacatgaatagccataaagatcggattgccgggaatttcagccagcacccggtgaaactcgacatctgaacgaataaacagcgcgttgtcatccagcgactggctattaatttccagcgctttcgttaacaacgcgatctgctcgtcggtagcatgttccgccgcatagcgtaccaggctggattcaaagaaaagccgtagctgttcaaagtgagcgatgccgccaggatgagtaagaaaatctttcgccatacccgacagttcactgatgatggtatcagcggaggggcgcgagacgcgggcgcgttcgccgttattgatttgcaccagacctttacgcttcagcgcagctaacgcttcacgcacggagggacgtcccacattgaagaaggccattaattcacgttcagacggtagctgttctccctcgccaaactcatgacggcggatcatctgctccagctcttcctcaaccatttcagacagttttttacgcgccagcgggcggcggcgcaaactacgcccgagggatgtcggagaatcttctgcttgcgaatcaaatgcgttcataacgtccattcatgagtggtcggtggcaaataatagcaagcttatcgtaacacagctttaaaagcagggtgaacccgagaggagaccaaacaaaacaggcccttcagggcctgttgattattttactacacgcagcgccggacgtccgccacgcggcggaggcggctcgtcatcaggactactgtcgtcatcgtggtcgggcttatcaccatcaatgacggacatcacggtctcgctttccgcgcctgcggtattgtcatcatcatttaagctgacaacgtcttcatcataggcggcttcaggctcaaacatggtgcctgcgccattttcacgggcgtaaatcgccagcaccgcagccaaaggcacagaaacctgacggggaacgccgccgaagcgcgcattaaaacgcacttcatcattagacagctccagattacctaccgctcgcggcgcaatattgaggacgatttgcccatcgcgcgcatattccatagggacatgcacgccaggcagcatcacatccaccaccagatgcggggtcaactggttatccagcaaccactcgtagaaagcacgcaacagataaggacgacgcggcgtcaactgtgacaaatccatacaggttaaccccgaccgaggcgcatttcacgttcagcttcggttaaagaagccaggaaagaatcacgttcaaagacgcgggtcatatagcctttcagctctttcgcccctgcgccgctgaattcaatacccaactgcggtaaacgccacaggagaggcgccaggtagcaatcaaccaggctgaattcgtcgctcaggaaatacggtttctgaccaaatactggcgcaatcgccagcagctcttcacgcagttgtttacgtgcagagtcggcctcggaagcagacccgtttacgatgacgttcatcagcgtataccagtctttttcaatacggtgcatgtacagacggctttcaccgcgcgcgaccggataaaccggcatcagcggcggatgagggaaacgctcatccagatattccataatgatgcgagattcccacagggtcagctcacgatccaccagtgtcggaacgctttgattcgggttgaggtcaatcagatcctgaggtggattgtccttttccacatgttcgatctcaaaactaacacccttttcagccaacacaatgcggacctgatggctatagatgtcagtaggaccagaaaacagcgtcattaccgaacgtttgttggcagcgacagccatgaaaacctccaggtatattcagaatttttactgctaccagccacaatgtgaccagccagatgttatgtcacccagggcgaaaaaagccatcattgctcagaaacgagacaaaaaatgaacattccccgctatttgggcagaaaattggatgatagtttaccagattttgtgacctttgtggtgagtcgattctggaaatgaggaaaaagagatattcctggtctgaaatgctcgccccacctgagatattgtctttcgcctgttatgcctgtactaccggtgcgccccagccatcaaaactgccgccatgtttttcagccagatcggtaagctggcaagtgatttctgtcatatgccattgttgcggagcatcggtgctgataaaagacgccataaacccctgttgcgggtcattcattcgaatactgaccagcgttatgccatacggtaatgcagcaatatcttgcgccaggtcgcgcgctgcgacctctgtaggcaatgtcgcataataatcaatagcgcgcggaagcgtcagatcatcaccttgttcctgtaatccccggcacacacgggaatcgtgtatccagttccagtcgtatcgggttggatacaagaactggcggtaaaagtttcctttatcattgtgactctctctataactaaaagagatttccgggccaccagcgagcaatttatccagcgtcttttcccagttaagatcctcttccgacatgaacacaaaatcgcgccagccttgttgggtaaccacacccaccagccagatcggaaacgtcttccccttttcatcaagccagtcctctatacgatttaaactctgtgtttcatcgggctgcggtaaaccattttcataacagttggtgtaatgaacacgtaagaacccggtatggataaggcgatcaaatttttcatcctgaatggcgccgatatccacacgtatacccgtaacatggtcatccaccgttgttataaagaattcccatttattcgacagcattaacgactctttcttagtaaacaatgagttaaaaaatcccactgtgacttccttttctctgagcgtgcatgaaaaatgaataagatgagaataatgctaaagatagggaggaaaagagactggattcggactttagccataaaaaaacccgccgaagcgggttttttcgctaacagttgtctgccgaagcagaaccccattaacgtttggagaactgcggacgacgacgtgctttacgcaggccgactttcttacgttcaacctgacgagcgtcacgagtaacgaagccagctttacgcagttcgccacgcagggactcgtcgtactccatcagagcgcgggtgataccgtgacggatcgcaccagcctgaccagagataccaccacctttaacagtgatgtacagatccagtttctcaaccatgtcgaccagttccagcggctgacgaactaccatgcgggcagtttcacgaccgaagtactgttccagagaacgttggttgataacgattttaccgttgcccggtttgatgaacacgcgagctgcggaacttttgcggcgaccagtgccgtagtattgattttcagccattgcctataatcccgattagatgtcaagaacttgcggttgctgtgccgcgtggttgtgctcgttgcccgcgtaaactttcagtttacggaacatagcacgacccagcgggccttttggcagcatgcctttaaccgcgatttcaatcacacgctcaggacggcgggcaatcatctcttcaaaggtcgcttgtttgataccaccgatgtggccggtgtggtgatagtacactttgtcagtacgcttgttgccggttacagcaactttgtcagcgttcagaacgatgatgtaatcaccggtatctacgtgcggagtgtattccgctttgtgcttaccgcgcaggcgacgagccagttcagtagccagacggcccagagttttaccggtcgcgtcaacaacataccagtcgcgttttacggtttctggtttagctgtaaaagttttcattaaaagcttacccaaataaataagttacacgttggtgaacacccaaacgttttaaatagttgaggttcacacgacaaagtccggtaaacctaccccctcggatatgtttggccggcacagagaaagtttgggaaaaaactctcttgtaacgtggggtcgcaggattatagagaagtccaggtcaaagatcgacccctttttgcgatttgccgcgggttttgttcaggcctggttcaccctccggtcggggaggttgcacagatataataccgcataatgccggagcgctgcgcttgtccggcttacggcatatgctcccgcttgagatactccgcactctgcatctcttgcaggcgcgacagacagcgctgaaattcaaacttgagccgctccccctgataaatttcatataacggcgcggcagcgctgaccaccagcttaacgtggcgctcgtaaaactcatccaccagcgcaataaagcggcgcgcttcgttctccatcagcggcgtcatgaccggcacgtcaaacagcagaaccgtgtgaaataaccttgagagcgcaatgtaatcatgctggctgcgggcctcgacgcacagcgtagcgaaagagaccgctagcgtttggttttcaacgcccagggtggataaagagcgatgattgatttccagcgtcggagcgtgctcgcgcgcggcccccgctaacgccagccacagtttatccatttgccgccgggtttcatcattaagcggcgttagccataaatgggcctgcgtcagcgtccgcagccggtaatcgacgccggcgtccacattcataatgtcgcagtgctgtttaatggcatcgatagccggcaggaagcgggcgcgttgcaaaccgttgcggtagagttcatccggcggaatattggaggtcgcgaccagcgtaatgccgcgtgcaaacagcgctttcattaaaccgcccagcagcatggcgtcggtaatatcggtgacgaaaaactcatcgaaacacagtacgtccgtctcggttttaaaccgatcggcaataatgtctaacggatcgatctgtccctgtaacgcggtaagctcttcatgcacgcgcagcataaaccgatgaaaatgcaggcgtagttttcgctcgcccggcaggctgtggtagaagagatccatgagccaggttttgccgcgacccacgcccccccacatatacagcccgcgaaccggtatttgcgcgtccggttcgtttttgcctaataatttccccagtcgcgctatcagaccgccgggtggcgtagccgacgattttttcgcggtgagcgcctgataaagggtttccagacggtcgaccgcctctttctgtacgtcgtcaggctgatgggtgccttcgttgagtgcctggagataacgcgatgtaggggaaaggctttgcataatgttattgttattccttgaaaatcgatgtgccgtcgttcacggctgacgaaaaaaaggccgttctacactacgcgatatgctgtcgggattccacttctacggaattagcggttatagtggcataatcaggcgcgggcatggagcctggagccaacaccctacggaaacataagacaacgggagatgttcatgacctgggaatatgcgctaattggattagtcgtcggtatcatcattggtgccgtggccatgcgttttggtaatcgtaagttacgtcaacagcaggcattgcagtacgaactggaaaaaaacaaagctgagctggaagagtaccgtgaagagctggttagccactttgcccgcagcgcggaactgctggataccatggcgcatgattaccgccagctgtatcagcatatggcgaaaagctccagcagcctgctgccggaaatgtctgcggagtcgaatccgttccgtaaccgtctggcggagtctgaggcgagcaacgatcaggcgccagtacaaatgccacgtgattattctgaaggcgcgtctggcctgttacgtagcggcgcaaagcgcgattaatcgcacgccgttaagaaatttatcgggcgcatcgcttgcgccctctctctatctttcctgtcccagctattatcattgttaccaggctgaaaattcaataacatcaatctgttttgaattgtctatccgttcattcaaggtacgagagcagcatccatgaaaaaacacacccagctgttaagtgcattagcgttaagtgtcgggttaactctttcggcgccgtttccagcccttgcatcgataccaggccaggtgccaggccaggcgacgctgccaagccttgcccctatgctggagaaagtgctgcctgctgtcgtcagcgtaaaagtcgagggaaccgccgcccagagccaaaaagtgccggaggagtttaaaaaattctttggcgaggatctgccagaccagccgtcccagccgtttgaaggactcggttcgggggtgattatcgatgccgcgaaaggctatgtattaaccaataatcatgtgattaatcaggcacagaagatcagcattcaactgaatgacggacgcgaattcgacgcgaagcagatcggcggcgacgaccagagcgatatcgctctgttacaaattcagaatcccagcaagttaacgcaaattgccatcgccgattccgacaaactccgcgtcggcgatttcgccgtggcggtcggtaatccgtttggtcttggacaaaccgccacctccgggattatttcagcgctgggacgcagcgggcttaatctggaagggcttgagaactttattcaaaccgatgcctctattaaccgcggcaactccggcggcgcgctgcttaacctgaacggcgagctgatcgggattaataccgcgatcctcgcgccagggggcgggagcatcggcattggctttgctattccttccaatatggcgcagacgctggcgcagcagttgattcagttcggcgaaatcaaacgcggattgctgggaattaaaggcactgaaatgaccgctgatatcgccaaggcattcaaactgaacgttcagcgtggcgcttttgtcagcgaggttttacccaattcaggttcggcgaaggccggggtgaaatccggagacgtgattatcagtcttaacggtaagcagctgaatagctttgccgaactgcgttcacgtatcgccaccaccgaaccgggcacgaaagtgaagctgggcctgctgcgcgatggtaagccgctggaggtggaagtcacgctggattccaatacctcttcttccgccagcgccgaaatgatcgccccggcgttgcaaggcgcaacgttgagcgacggccaactgaaagacgggacgaaaggcgttaaggttgatagcgtcgaaaaaagcagtcctgccgcgcaggccggtttgcaaaaagatgatgttatcatcggcgttaatcgcgatcgcatcagttctatcgccgaaatgcgcaaagtgatggcggcaaaaccgtccatcattgctcttcaggtagtacgcggcaacgagaacatttatctattgctgcgctaatcctgtcttaaaccgggcatcagcctgcgatgtgatgtccggttaactcatggtatgctgctgccgttcccttttttaacgacgcctccatcatgtttgtgaagctcttacgttcggtcgcaataggtttaattgtcggcgctattctgttggccgtgatgccttctttgcgcaaaattaatcctatcgccgtcccgcaattcgacagtaccgatgagacgccagccagttataattttgcggttcgccgcgccgcgcctgccgtcgtcaatgtctataaccgcagtatgaacagtaccgcgcataatcaactggagatccgcacgctgggttccggcgtgatcatggatcaacgcggttatattattaccaacaaacacgtgattaacgatgccgatcagattatcgtcgcgctacaggatggccgcgtctttgaagcgctactggttggctccgattcgcttaccgatctggcggtgctgaagatcaacgccactggcgggctgcctaccatcccgattaatacaaagcgtacaccgcatattggcgacgtcgtactggctatcggcaacccatataatctgggacagaccatcacccaggggatcatcagcgcaacgggtcgtatcggcctgaacccgacggggcgacagaattttctccagaccgacgcctcgattaaccacggtaattccggcggcgcgctggtcaactcgttaggcgaactgatggggatcaacaccctctcttttgataagagtaacgatggcgaaacgccggaaggccttggttttgcgattcccttccagctagccacgaaaattatggataagcttatccgcgacggtcgcgtgattcgcggctatatcggtattggcggacgagaaatcgcgccgctgcacgcgcagcagggtagcggcatggacccgattcagggcattgtcgttaatgaagtgacgccaaacggccccgccgcgcttgccggtattcaggttaatgatttgattatttcggtcaataataaacccgccgtgtccgcgctggagacgatggatcaggtggcggaaatccgcccgggctccgtcattccggtcgtggtaatgcgggatgataagcagctcacgttccaggtgacggtgcaggaatacccggcgtcgaactaaaacgacgcggcttttgcccgcgtcgttcgacgactagtcaataaagactggccctgccggaaaatgcgccaggaaactcgtgaagatcagcagagcggggagacttttctccccgacggcttcttcacgcagcgccttatccagtacaagcaggctatgctcccccccttcccccaaaatgccgcccatccagagcagtcgttgcgcctgttgacgcgcatactgcgatgcgcttttccaggcgaccagatgcagcaacgtttgtaacagcaggacccgagacgcgtgaccatcgcgttgcaatcgcctgaatacgggtaatgcaatactacgtaccgtcgagaaaccgctcgccgcctccccctcaatcggcgataaaccaacagccgcctgtttgacgaaatcgcataactgattgtgtgttaatggccgctcgcctgcgctcatataccctgcggcaaaacagagtaacccgataccctgagcccaatcggttgatggcagaatcccctgcggaacattcggtgccgacgtctgtgcggcacaaagcccctcgtcgtaacactgtgcaaaacgttgctcatatattgctgagttgacgccagaccacggcagtaaatgcagcgctggctcaagctcagttatctgattcaccgtctcaacaacataatgcaagatggtttctctggatggcatggatgtaccttgccgaaacgcaaccatttcactcattactgtgtcctcattttgcgggaacagaatcactgctcccgattagattggattacatcgccagcacgtacttgagcatcacgcccgccgcaatggccgagccaatcaccccggccacgttcggccccatcgcgtgcatcagcaggaagttctgcgcgtctgattccaggcccactttgttcgatacgcgtgccgccatcggcaccgccgacacccccgccgaaccgataagcgggttgattttgttcttactgcacaggttcagcagcttcgccatcagcaccccggccgccgtcccaatcccgaacgcaatcacacccagcagcagaatgcccagcgtctgcggctgcaggaacttgtccgcgaccagcttcgcgcccaccgacagcccgaggaagatggtgacgatattaatcagcccgttctgtaccgtgtcgctcagacgctccaccacgccgctttcacgcatcagattgccaaagcagaacatccccagcagcggcgccgcgtccggcagcagcagcgccaccagtagtaacagcaccaccgggaagaggattttttcccgcttactcaccgtgcgcagctgcaccatgcggattttgcgctctttctcgctggtcagcgcgcgcataatcggcggctggattaacggcaccagcgccatatacgagtacgccgccaccgcgatggcccccagcagctccggcgccagcttgcccgacagataaatcgccgtcgggccgtccgcgccgccgataatgccgatggccgccgcctgcggcagggtgaagctgataaggccgaagtagttcagcgtcaacgcccccagcacggtggcgaagatgccgaactgcgccgccgcccccaacagcagggtgcgcggattggccagcagcgggccgaagtcggtcatcgcgccgacgcccataaagatgaccagcggcgcgacgccggagccaatcgccactttatagaacagcgccagcacccccggcgtgtagcccatgtccaccgccaggttctccatctggctctgcaccgacggcagcgccagcgctaatgcttccttaatggcatgcacgtccggcgcgcagttcagcttcgcggcaatcaccgccagctgtccggcgtcgtggtgcgccagcaggctttccagcgcggtcagcgccagcccggcctccggaatgttcgacagcagcccgccgaagcctatcggcagcagcagtaacggctcgaacttcttcgcaatcgccagccacagcagcagcaggctgaccagcagcatgatggcctggcctgcgccaaggtgcatcagccccatgccctgaagcagggcgttcagactttccatttccgctcctcgtccttacgccagcgtcatcagggtgtcgccgacggagaccgcatcgccggacttcaccgcgataccgcgtaccgtcccggcctgcgcggcgtgaatttcggtttccatcttcatggcttccagaatcagcagcacatcgccttcggccaccgtctggccctcggtggcaatcaccttccagatgttgcccgccagcggcgcggtgaccggggtgccggcgcctgcgggagcggcagcctgaaccggtgcggaagaggctgccggaacagccgcagtaagctggctgatatcgccgccgtcgctgaccttcaccacaaaggctttgccttccacttccacggtgtagataccggaagctgcaggcttctctgcttttgccaccggctgcgcggcttccgcctgcggcagtggctcaaacgccgccgggttgtggcggttctcaaggaatttgaggccaatctgcgggaacagcgccacggtgagcacgtcgtcaatggcgtttcccgccagagtaatgcccttctcctgcgcctgacgcctgacgtccgcttccagttcagccagctccggtttgagtaaatccgccgggcggcaggtcaccggagcgcccccttccagcacgcgggcctgtaacgcggcgttcaccggcaccggcgtgtggccgtattcgcctttcagaatgccggccgtttctttggcaatggtcttgtagcgttcgcccgtcagcacgttgagcaccgcctgggtgccgacaatctgcgaggtgggggtcaccagcgggataaagccgaggtcctcgcgcacgcgggggatttccgccagcacctggtccagtttgtccgccgcgttctgctgcttcagctggccttccaggttagtgagcattccgcccggcacctgggccaccagaatgcggctgtcgtagcccttcagctggccttcaaaggcgtgatactttttgcgcacctcgcggaagtacgcggcgatattttccagcttcaggatatccagcccggtgtcgtgttccgtgccggcaagcgttgccaccagcgcttcggtggccgggtggccgtaggtggcgctcatggacgaaatcgccgtgtccacgccgtcgacgcccgcctcgatagccttcagcagggccatctccgccatcccggtggtggcgtgacagtgcaggtgcaggcgcacctcaaaacgtttttgatttcgctgaccagctcatacgccgccatcggtgtaagaatgccggacatatccttgatggcaatcgagtcaacgccggtctctaacaactgttcggttaaatccagccaggtctgcagggtgtgcgccgggctggtggtgtaggagagtgtgccctgggcgtgcgcgccgtggctgcgtactgcctgcagggcggctttcatattgcgcgggtcgttcatggcatcgaagacgcggaacacgtccatgccgtttttcactgcccgctcaacgaagcgttccaccacgtcatcggcgtagtggcggtagccgagcaggttctggccgcgcagcagcatctgcagcggggttttgggcatggcttttttgagctcgcgcaggcgcagccacgggtcttcgccgagaaaacgaatacaggcgtcaaaggtggcgccgccccagcactccagcgacccgtagcccacgtcatcgagcgcggcggcaatcggcagcatatcgtcaaggcgcaggcgggtggcgaacagagactggtgagcgtcacgcaggacgacatcggtaatggcaatggtcatggatccctccgggaattaagcattaaggcggtgatggtggtggatagcggcggcaatgaccggctttaagcgggtgaagtcgtccacgacgggcgcggcggcggcaggtgccgccttcggcgccggagccggttcagggaagaagcggttgacggcggcggacatgccgcggatggcgaaaatcagcaggaacagaaacgccagcacgaaccccatgccgaggaacatcagggtgaagccttcacctaatagcagagctgcattagtcataaaatagccttcaggcaggaggcacgataatggggctatttatgacgatgaaataataagggtggatttccctgagccgccccggccagagcccttggttattattatcgtcataacgtattaccaccattatcgtgcaatttacgtaatcaggtttatttgatgaaacttacgttctggcatatttcatcagcgacgatctctttacgctgattaaaaataattttgttctgttcaaacagattattcccatgggtatcaatagaaacaatcagcgggccaaactctttaacccgacagacccacagcgtttccggcatccccagatcgcgccattgggcatcttcaatttcttccacgcacacggcggctacaaccgcacaaccggcagggaatacgcagtgcagcgctttgtgttcagcacagccctcttcggtacctttacccataccgcctttacccacaattaatttcacgccagtctgcgcaataaactctttttcgaatttctccatacgcatgctggtggttgggccaacggagaccatttcaaacttatcgtcttcgcctttaattgggcggacaatggggccagcgtgtaaaatagcgccgccgcgaacatctaccggaagttcgcgaccaccttcaattaaacggcgatgggctacgtcacggcaggtaacaatatgaccgttgagataaataatatcgccagccttaatatccgctaaatcttcatctttaattggcgtagtcaggatttttttagtcatcagaaattcactccgctgtgagacgtaatggtgtaattcaaatctttatcgaaaacgatatgccctttacggtgcgaccagcagccgacgtttaccgccacgccgatggtagaaggatgacgcgcggtgttttcaatgttcacgcccataacggaggtattaccggacatcccctgcggccccaggccaattttgttaatgccgtcttccagcattttttccagcgaggctgcacgctcattctcgttatgcgaaccgatcggacgcatcagcgcttttttcgatagcagtgccgccgtttcaacagaggtcgctacgcccacgccaaccagcagcggcggacaagcgttgaggccgtagctggtcatcacatccagtacaaagcgggtcacaccttcatagcctgcacccggcatcagcaccatcgctttccccggcagagaacaaccaccgcccgccatataggtataaatgctgcactgatcggaattgggaacgatttcccagaagaccgtcggcgtacctttacccacgtttttaccggtgttgtattcatcaaaagtttctacgctgttgtggcgcagcggagaatctacagttgctttgatcaccgcctcacgcaacaacgcttccagctcgccaatcagcggaaagttcgtcccgcactccaccagaaactgaatgacaccggtgtcctggcaggaaggtcgatccagctctttcgccagacgctggttctcaatcatggtagtaaagatgacgtcggccagtttactggtctctttcttatgcaaatcttccagttttgcagtgacatcatcaggcaaaactttgccggtatatcccacaaacttggccataacgtcggtcatatgggatatctgttcacttttgctcataaatgctccttagtcagaacagcttccgttaattacggatgaaaagggaaaaggattggcagcaggatcaagctgacaatggttgaaacgataatcagggggataccggccttagcgtagtcgacaaatttatagccacccgcggagagcaccatcatgttggcaggcataccgataggggttgcgtaggcgcaggaaccgccaatgaccgtcgccatcagaaccgcacgcgggtcggcccccatgcctgcggcaatggacaaactcaccggcaccaatagcgctgtcgttgcggtattggacataaagttggtcatcacaacggataaggcgaaaacggcgatcagcaacatgaacggtgaggagttttgccccagcatgccgattacatagtccgcaaccagcttgcctgccccggtcatttccagcgcttttgccagcgccagggtgccgccaaagataaaaatagtctgtgaatcaatagctttataggcctgtttttccgtgagtacgccgcttactaccagcacaagagcgccaatacaaccggtcacggccaggctgacaccgatcttcttctcaaagatcatgccgaggatcgttgcgatcaacaccacgagtgagagccgttgtttccactgtggaacatggctgtagtcacgttgcaccccgacgctccccacctcaccgccggtcgcattattcggcagaaagcgatagccaatagtcaggaagtagagaatgccgcagatgagcatcgggagaccgatttttgcgtattcaaaaaagccaaagccgccgccaatattctgtagcgcagactgcgcgataagatttcccggcgcgccaattaacgacaggttaccgcccaacgcagcggcaaaaaccagcggcatcagtagacgagaacgcgagaagcccgattttgccgccacgccgatcaccaccggaatcaaaaccgcagcggtaccggtgttagagaggacgccagacatcaaacccaccaccaccataatggtgaagatcagctgtttttctgttttcgcgaagcgcgtgatgacgccgcccactttgtttgccataccggtctcgaacaacgcaccgcccacgataaacatcgcgacaaagaggatgacgttagtgtcgataaagccagcaaaggcctgtttgatattcagaacgccggtgataactaaggccacgcagacaatcatggaagtgacggccagtggcactttttcccatacaaacatgacgatagcgaacaccaataaacataaggtaagggtaatgggttccatatttataattatccaatcaatgatatatgatattgtatccaatgttgacagggagaaattattcccatacaaaaactaagtcaaatcgtttctcaggaaagatgcaggagtgggatctacatcaagatcgtggttagatcgttactggacgtgattaatagaattgaagaattggttgaagcgcctgcgatgctcacgcaggcgaaaagatcaggcagaagggtcaccaacatagcgggtcagcatattctccattgagcgaataatgtgttcgcgcatgcgctggcgtgccaatgtttcatcatgaagttcaagagcttgcagaatacttttatgttcctgaatggaaatcacggcatactcttcttcggtgaccttatggcccatcgacaggccgttccacatattacagagcaacattttcattttttcgttgccagcaacattccatatttccatatgaaatgcctgattcaggtcggagtattccgccgagttattttccgcgagagccttttcagcggcataatgcacctgggctatccgcgagatatcggagccaggacgagaagctttagccaccgcctcactttctaacagcgcgcgaatttcatagtgttcacggatcgtttgttcattgatgcccaacaccaccgcccctttattagggcgcacttttatcagcccatccgccgccagaatctgaaacgcctcgcgcactggcatactggacacgccgaccattccggcaatgccttctaacgtaatctcctgcccttccactaactccctcgaaagaatcgctttacgcagcactgccgcgacctgttctttcgctgaaagaagcttaatcttccctaacttaggcttctgcactttcccaatccttcatatgttgacgcattatttctgctaaagagaggaaataacgctgcataacttgcccaatctcatcacgccgcccctggcgtatgacgtcagccagttcagcgaaaagctgcgccgactcctgattatcttttttcagatgcaaaataacataagagacataaccgtccaggaactgctgatacaccttttccagatagcggttattcacataagaaatcagcatcgcatgacactccagttcgcaggatttgtcttctgcgacagccagcgcttgcgcacgtatcaggagggcatcgcctacttcgctgggtatcagcgaaaacatttcggcggccatcgcggcaatcacgcgaaaaatatgactcacgcgatcggcctcaagatgcgcgacctgcatgtgcctgttgggcagtcggattaaaaaaccttcctgttcgagtgactgtagcgcttctcgaaccggcattcgtgaaagaccgagctgctccgcaatactttcctgcgcgagttcttctcccgcttttatattgccggaaagaatttcatagcgaagcatttgcgtaatgtgatcgcgggtttgcgttctttggatctttttcacgacgttctcgttaataaccgataagacgtgaggagtttagcagatttagtgcttgatttcgtggcttgtttacagtcaaagaagccggagcaaaagccccggcatcgggcaggaacagcttatttattaataaaatcttcacccaactgaatatcttttttcagcgtatccagcatagcgtccagcgaatgttgctcgaaagcgctcagtgtgccgatggatttacgctcttctacgccgtttttacccagcagcagcggctgagagaagaaacgggcatactgaccgtcgccttccacataggcgcattccaccacgcccttctcgccctgcagagcgcgaaccagagaaagaccgaaacgcgcggcagcctggcccatagagagggttgccgatccgccgccggctttcgcctcgacgacttcagtaccggcgttctgaatacgtttagtcagctcggccgcttcttgttcggtaaaacttacgcctggaatctgcgacagcagcggcagaatcgtcacgccggagtgcccgccaatcaccggcacttcaacttccgttggcagcttacctttcagctctgcaacaaaggtattagagcggatgatatccagcgtggtaacgccaaacagtttgtttttgtcgtatacgcctgcttttttcagcacttccgccgcaatcgcaacggtggtgttcaccgggttggtgataatgcccacgcacgctttcgggcaggttttagcgatctgctgcaccaggtttttcacgatgccggcgttaacgttaaacaggtcggaacggtccatacccggcttacgcgccacacccgcagaaatcagtactacgtcagcgccttcaagcgccggggttgcgtcttcaccggagaaacctttgatttttacagcggtggggatgtggctcaaatcaacggccacaccgggagtcactggagcgatgtcgtacagggagagttctgaacctgaaggcagttggttttttaaaagtaatgccagcgcctgaccgataccaccagcagcgccgaggactgcgactttcatcctaaactccttattatatgattagctaagtgtctattgctccgcggcggcgaccttaattcacaaattcaatgattacaatcctcactcatcaagaatgcggagtcgcgcaattttggcttttatgcatttaatttgcgtaatccggatcggctgcaaccagagagcaacgttctacaggtggtgacaatataccctactaccctctcaaaacaacatcattttgataacaattaatttacttttaatcttatttgcgaggcgtgacacaggcatgtttcttgataacgaaatttgataaaattccgctctttcataacattatttcagccttaaacaaggcagactgtttgcataaaaattcatctgtatgcacaataatgttgtttctaccgccatattacgggtgacttatgcgaagctcggctaaacaagaagaactagtaagagcgtttaaagcgctcctcaaagaagaaaaattcagctcacagggcgaaatcgtcctcgcgttgcaggatcagggctttgaaaatatcaatcagtccaaggtctcgcgcatgttgactaaattcggcgcagtgcgtacacgtaacgcaaaaatggaaatggtgtactgtcttccggctgaactgggcgtcccaacaacatccagtccgttgaaaaatctggtgctggatatcgactataacgacgctgtcgtggtgattcataccagccccggcgcggcacaactcattgcacgcctgctggattcactggggaaagcagaaggtattctcggcacgattgccggcgacgatactatcttcactacgcctgccagcggcttttccgtaagagatctgtacgaagccattctggaactttttgaacaagagctttagtcccacttcctccgtcgtcgtacggcggaggcacctttttgtcctctcccctcgccgctttcctgtacgcctatcatttggcaaatcatgcccttaaacattcaccacatgaatgataaatcaaaaaaacgcacaaaatgtcaaatttattaagcaattgattttcttttattttttaaacgacagcggcgaaaaacagcaattttaattccataacgttataaaaaataaaatttttaatgtttttaaaaagcagaaacaattagcgtggtattaattaatcgcgtgattagtgtatacttaattttgtgatgagggtcacgaaacaaagtccccagtaaaggaattcgacgaggtaaaaatcatgaaaatcaaaaccactgttgcaacattaagtattctgtccgttctctcttttggcgctttcgccgcagaacctatcagcgcagagcaagcgcaaaaccgtgaagcaatcggatcggtttcagtcagcgctatcggctcatcgcctatggatatgaacgccatgctgagcaaaaaagcggatgaacaaggcgctacggcctaccacattaccgaagcgcgtagcggcagcaactggcacgccactgccgaactgtacaaataaaattcacctgccatcgcatataacgtgtccttgcttcgcggagatatcgcataagaaaagcccattaatccgcgaggttgaccctataaaggaataaaagatcatgaaaacgaaatacattatcgcatcactcggcctggccactctgctctctttcggcgcaaatgccgcagtacatcaggtcaacgcggaacaggcgcagaatctgcaaccgatgggcaccatttccgtctcgcagattggtagtacgccaatggatatgcgccaggagatcgtcgctaaagctgaaaaagcaggcgctaatagctatcgcatcatcgaattaaaagaaggtgataactggcacgccaccgccgagttgtataagtaaaccctcgtcgtctaacccgacgacttgcccccgcctgccgggggcttttttatgctttttcaatgccggacattaaaccgtagccgcccctccagctcttcttccgcttcatcaaagagtaaaatcagcgccccgtagcgcctgcgcagtttatcaggcaggtgaacgaactcaatctctagcggtaggggtaagatatcgctcattaccgcatcccataatgtatcaagatcgcttactttctcactggcaagaccaaacgtctgcgtaaactcgcgataaaaatcgctttggtttttaatatcattaaaatcaaaagtatagacattcatagccagccaccatccccgacagacaattgtctgttttactactaagcatcattatgcagaggtttcacttccagaaacgcttttagccccggagcactcttgcgctgtttttgtatctcaaataagtatagtcataaaaaaaccgacgcttttggcatcggttcttgtgggttagctatcggtaagcgcgttctggtatttatgtaacatacccgtcaggcgtttaaccggttccgtcacctgcggcggcgcctcccagatacgtaatttctcctgatagatatccagctcatccagcaactgaccaaagtagcgtcgccgtttatcatcgcttccggcggaaataacatggtctgcggtacgacgaagctgacggtggaacactgacagatcttcattaaccggtatcggcgcgtcgcgcagacgttgatgagcaatgatcatcgttagcgccaggcggaacttcggcaaatcgccaggaaatttattcatcagcaaaaagagttgctgatataacgcaggcagacggttttctttacggcgtaccacgttggtcgtcattgccgagaccgcagcggaaacaaactgattaagcagcacgcgaccggttcgatctttggatttatcacgcaccagcaggatgacgataaacgccagcatacagccgacaatttgccccaacgcgctgtcgaggaactggctgaaatggaacgtcatcggattatccaacacaataatgttaatcgtactggccagcgcccccatcgaccccagacgccgtttctggacctcaatgccgataaagaaccccaataccgccaggctcaaacataacaacagcatactttgctgcgtattgggaataatcaccaggaaatagagcaatcccagcggcaacgccgccagagtgccataaataaaatcgatgcagaccatgcgcggattgggtaaacgcatcgccagcgaggtcaccacggcaatcatcaccatcgcgccattacccgatgtccagccggtccatagccagaataatgtccccagaatgcaggaaagcgtggtgcgccagaagttcaccatcgcatggtgacgttcagcggattccactttaactacgggctcgccttgcaggatctcttcttccgtcgcgctgattttggtgttactgatcacgccgcgtttaagcaatagatagcgcgtcgcagcgcctacccagctataaagcgtgacgggcgtttcgcgctcgccagtccagacaatgacacgccgcatccgttttaactgtctgtggacgtcctgtaccgtttcaaccggcgtctcgaacagttcccggaatgtatcggtaatcagttccggccgcgtgttttgaataagataagtttcacaggattgcgtaatcagcgtgagcgaaagcgtattcaacgctttcaggcggcggttagcgcgtacccagcgcgaagattccatattcagattacttcgcatcccctccagcgccgccgtgcgtcgcaccagatcgccccaggcgttgtcgacttcttcgctgtcgccatgcttaatacaaagctgcattagctgatattgcgctaccagtaaactgtccagttcgcgatcaacctcctgctttatcgatcgcggcgagaaaagcagatccgctaaaatagcgcagccaatgccgataacgatttcgctacagcgctcaagcgcaaattgcggcgtgagcagcggctccgtctgaatggtaatcacaatgatcagcgcagtataacctgacagtccccacgcataagagttttcgatccgtactaaagaggagatccaggtacaaaaaccggcccagacacagcacaccagaatcatcaataacggcgcgcggatcatagagataataatgataagcgcggcgatacagccaataaacgtcccgataatacgcaacattccgcgataacggatagcgccggaatagggttctccgccggcggcaaatgccgggcctgccgccacgatcgcggcggtcagcaccgcccaacgcggcgtctccagttgaaaatggaagccgataaataatgccagcacaatggcgcacgccagctttaccgcaaaacgaatgtgctggttggcaatggagaaaatgcccatgacgattaaccgaattcgcgcagccggtgcgccagtttacggaagaaggagtcctggcttgcgtcacgatcctgcttaccggtgatcacgacggttgccgtcgtaccggcaggccacaaattcccctgctgctcgtcgagccggatgcgcaccggaacacgctgggccagacgcacccattcgaggttagagtctatcgtcgccatccctttcgcatcgctggtactgctggcattcgttacccctgccgccacgctatcgacggtaccttttaatacccggttgctgccaagcggcgtgatttcggcacgatatcccggacgcacgccttccagcttggtctcttccatataggcctgcacgtaaaaagagttctttttcaccagggcgacggccgtggaaccgcgggtaataaattcaccggcataaacattgaggttagtcacccagccgtcagcaggcgcgcgaataacggtgcgctccagatcgagtttagccaggtcgcgcgtcgcctgggctttagccagttgatgcagtaccgtctgcaagacgttgttcgcctgatcgatctcttcccgggacatcgcctgtacgccgaggcgattacggcgaccggcttcctggcgtttttcctgcgccagtacctgataataggctacatcagcttccgcttccgccagcgctttttgatagcgtggctgatcgatggtaaacaggacctgatcctttttcaccagttggttatcatgcacgtttacatgggtaatcaggcccgcgacatccggggcaatagcgacgacatcggcgctaaaacgcgcgtcgcgcgtccagggagattcggtgtaatacacccaggcgcggaaaatggcgataaaggccagaataaccagtacgagggtaatggccgtacgggagagttttcttgttagtgttttcacttcaacctcaaacgaacaggcgcgatattaaataaaacagacaacaatacagcgcggtattgaacagagccggatgccagacaaaatcatagatgcccgtcggcacaagcatccgacgcaccagccaaaaaatagccagtgacaaaagcaattcgaaaaatatcggtgggaaggaaagaccaaacaccacgataacgggaaacagactcatgttgaccttgatttctgagagagagcaggcgatagattgttaagctacatcgccgcagagaagggcaagagacgccaggcgagagcgacatagctcttattcgaataatagtatattaacgtaattgttatgctgttatctatattatgtgatctaaatcacttttaagccagagtgaataatggaacgattaaaacgaatgtcggtattcgccaaagttgtcgagtttggctcttttaccgccgcagccagacagctgcaaatgagcgtatcgtccatcagccagactgtggcgaaactggaagatgagcttcaggttaaattgctcaaccgcagcacacgcagcattgggctcaccgaagctggaaaaatctattatcagggctgtcgtcgtatgctgcatgaagtgcaggatgttcacgagcagctttacgcttttaataacacgcctatcggtacattgcgtatcggctgttcttcaaccatggcgcaaaatgtgctggccgggcttaccgcaaaattattaaaagagtatcccggtctggcggtcaatctggtgacaggaattccggccccggatttaattgccgacgggctggacgtggtgatccgcgtgggcgcgctgcaagactccagcctgttttcccgtcgactcggcgcgatgccgatggttgtgtgcgccgccaagccgtacctcgctcagtacggcgtcccggaaaaacccgccgatctcagtagccattcctggctggaatatagcgtgcgcccggataatgagtttgaacttatcgcgccggaaggaatttctacccgactgattccacaggggcggttcgtcactaacgatccgatgacgctggtacgctggctgaccgccggaaccggaatcgcttatgtgccgctgatgtgggtgatcgatgagatcaatcgtggcgatctggagatcctgctgcctcgctatcagtccgatccccgtccggtgtacgcgctgtacaccgaaaaagataagctgccgcttaaagtgcaggtagtgattaacgcgttaactgactattttgtcgatgtcgcacacctgtttcagggaatgcacgggcgagggaaagaaaaataaaaacaccgggtaattgctgaagacgattgtaggtcagatgccacccgacgcagacattgcctgatggcgctgcgcttatcaggcctgggcggcacacaccacaggcctgataaggcggacagttatgcggtgccgccaaccgtcaggttatcgactttcagcgtcggctggcctacgcctaccggcagactttgaccctctttaccgcagacccccaccccgttatccagcttaaggtcgttgccgaccatggagatctgttgcatcgtttcaatgcctgatccaatcaacgtcgcgcccttcaccggcgtcgtgactttgccgttttcaatcagatacgcttccgaggtagagaacacaaacttgccggaggtgatatccacctgaccgccgccaaagttaggcgcatagatgccgtattcaacggattcgataatttcctgcggcgttgactgccccgccaacatataggtattcgtcatacgcggcatcggcagatgcgcataagattcgcgacgcccgttaccggtcggcgcagcgcccatcaggcgcgcgttcagcttgtcctgcatgtatcctttcagtacgccattttcaatcaatacgttgtactggcctggcgtaccttcatcatcgatagcaacggagccgcgacggttcatcattgtgccgtcatccactacggtgcaaagcgcggaggcaacctgctcgccgatctgaccgctaaatacagacgtcccacgacggttaaaatcaccttccagcccgtgcccgaccgcttcgtgcagcaatacgcccggccacccggcgcccagaaccaccggtaacgtccccgctggcgcagcgaccgcggagagattaaccagcgccatgcgtaccgcttctttcgcccacgcgtcagcgcgaacctcgccgtcgagatcggcaagaaaatactcataaccaaagcgaccgccgccgccgctggcgccgcgctcgcgtttaccgtcttcttccacctgcacgctaacggacaaacgcaccagtggacggacatccgccgccagcgtcccgtcggtcgccgccacgaggattaattcatatacgccggtcaggctggcgttaacttcctgcacgcgtttatcggcttctcgcgccgctttatcaacgcgtctgaggatatccagcttctcttcgcggctcatactttgcagcggatcaagggtggtgtagagcggctgatgcgctacggcggcgagcgtttttaccttgccttcgccgttctcgcgtacaatggttcgcgctgcctgcgcactctgctccagcgccaggaggcttatctgatcagcataagcaaaaccggttttttcgccgctaatggcgcgaacgccaacgccctggtcgatattatatgaaccatctttaatgatgcggtcttctaaaacccaggattcgtgatagctcgactgaaaatagaggtcgccataatcaagacggcgttcggccagttggcccaaaatagcgaacagatcctgatggttcaggccattcgccgctagcaattgttcacttaccaggttcagactcatcgtttttgctactcattgatttctgccggatggcggttcacgccttatccggactacgttgttagattgtgcaaaccggataaacgcagcgccgtccggcatgactatttactgagagtggggcaattcctcgcccccgtcaaatcattgctggctttcttttctcggttggcgcagaacttcgttgatctgcggcgcatcgaccggaccggtaatgcgataacgcagaatggagaccttgctccatagcggccccaacactttactggcggcaaataccgccgcgccgacaatcgggttaacggcaaacgcggcggcgacgcccacggtggcggaaatttccggcgcgacaacggcctccatatcaagacgacgacgcaccagatcaacagaacctttcattgcaatatccgcttccagcccatccaccagcgtatcgtcagtatgtaggacgccatctttaatccacgcggtactatgaatagagtcgaaatagaagccctcgctaaaggtatctctgaagtcaaaccgcagcttacgcagcaacgcatcaaaactgagcagccgcagtagctgtccggcatgaccgctactgagatcagtaaactcgcctttacccagacgcgtgcgtaaaatcccgttgagcgtggcttcatcaggttgccagggcgggtttcgccagtgcagatcgtaatctacgttaaaagacgcgttctggattggcgtcgagataccgaagaacccggcagccgtgtcgaggttactaccatgcagactacctttcagcgaggttcgttcattacccggcgcattcacccactcgccgttcgctttcaaacgggcgaatccggtatcgatcaggccattcgccagagtcagcgtattgcctttgatggcgaaatcgccatcaatacgcccatatttttgcccccatagccagcactcttcgcagcgaagctgtaagtccggccagccacggaagctaatcgtgttcgccgaagccaacggcgatgtcggcgttggtgacgaggcgtgcgtttttgcgacgccagggttgtagtacaggtacttaatgttcgccagccacggcgcatggttgcgcatgagcagcgtggcgttcacctcacggccctgcgcttcaatttttgttccgttcagcgagggggctgaaacgacgctcaaattgttccactgctgaccgcccagcgatagcgcgggagtacgcaacgtgacgcgttgaggaaactcggccgaactgctcacgttatccgccgcgcctttctggaataacgccagccattgcgcgccatccagcgccggcagattgagctcaacgccttgttgagcaggtaatggcggaatcgtccggctgtccgtcgtccagatagcccgatccaacgtcagcttctgatttaataaccagcggctgttaaagtgatttttactccctgcgctccccgttagcgcaaaacttttcaggttgccgtcagcctgaatgttcaccggaatggcttcgcctgcgggtttatttagcggagaaggtaagtgactgctcacatttctcagatcgccattcagctcgatgtgataagtggtgtcagcgtgatacggaagatcgatgccgactttaccattccacgtcacgctgccgctcagggcgtcattcagttgcggcggtaagacgcccatacgcgttggctgccagttaccgttcaggttgacggcgacctgataggcttttgccccttccgtcgtactgaaatccaggttcagcggctgattaaaccagtttgccgtcagcggcccgctttttagcgcgccattcacaaagctgaatttaccgttcagatttttgagcgtgctgtttagcggcttaataaacagactgttattacgcaacgagacatcaccctcagcggtaacctgttcgccatccagcggaatatcaagatgtaagcgagcattcacatcgccatctaactggagctccgccagcgtcgagccaagcgagtcttttagtggcgtctcgtcgaaataaggcccaacggcttttcccggcccgttaatatcggcatcaatgagcagtttctctttggaataatccggaatcgccgccgcgagtttgctggccttcaccccgcccaaatcgacgctatccgaacgcatccacaggccgtcgttcaggaaatccagttcaatgttgagattttttagcgccggccagtcgggttgaaaggcaaacgtcgcattgcgtagcggcaccagcacttcaaactgaccttcgttatgcttatagggaaagaggtgcgggttaccaccgtaaaccaacgtggcgttatccgcctcgccgccctgaattgcgccgctaaggtaatcgaccagcgctttgcccatcaggttttccggaaaatagcgccacgcctgagatccatcgtcggtactgattccggccagaatacccagccacggttcgtcgcccgtcggttgcagatagcggaacccgccgcgcgcgtgtaccgcctttgctttgacgtcaatgtcgcggccatcaagctgaaagccgttctcattcttcaaccaactaagcgtcgcgacgccgttttcaatttccagcggcgcgcgaaaaacggtttcatagggcatcttagcctgctgcatcgcaaccttcatctgcccgtcttctacgcttcccgccagcgtaccggaaaaatgttccgcgccgggcaacagcttccactgtttccaggcaagattttcccacgatgcctgaaaacgcgttttttcggtggcctgtagcggaatatccagcgccagtgtggcgatctttccgctcggctgcgtagcctgccatatttcgcccagcacaggcgacagtttagccgccagcggacgtaatgcttccagccccgccagttcaagattactggcgcgaatgcgtagctcatcgctacgtgtgtgattctcgccgccgacgtcctgctgcgggagccaggccacggttaaggctccgctcggccagggtttaccatcaagcgtaatccgtgtgtccggaatataaaactgccagcccggctgctcacggctaatctgcgccgtcaggttatcgacagacaacgtgtgcgtcgtgttatcgcccaaccagcttgcgccgccctgtttcagccagacgtctcctccggcgatttcacctttactgagcgtcatccagccttccagactgaaacgcgccgtctggagcgccacattatcctgcatccatttgcccagccacggcttgacgtcaatatcgtcggcctgtaaccagactctgccgttatttagcaaaccgtcgtcatcgcgtaaatccatccgcacctgcatcacgccgtgctgcccggtcaggctggagagactgacctcgccttcggcgcggtgccgctctttgccgtttagccaggtaagctgtgggatcgccagctccgcgcgttgtccggaaagcgtcagaaaactgatttggctatcgcgcagatcgaaatgatcgaactgccgcaggaaaagatcgcttaaacggctggtttcgatgccttcgccgtcgctgctttgaagaggcgtgttggtgcggaaattgagttgccagaaggtcaggtcgcgaaactgccagcgcatatgcaacaggctttgccagacgtccagcgccagcgtaacgcgttttatcgacagttcgccgccatctttcagggcggcatgaatattatgcgcttccagcgtagggccaaaattttgccagcttgcggagagttggctggcggccaccggcacgccggtcacagactcaattttattcaggatagccggacgccaggcgtcaagatgaggcaacgccaggcgcagcccgctaaccagcagcgctgcaatgacgatgagcgcggctccagtgagcaataaaatccccggcaatcgcctcacgcgtctctccttgtctgccaaaaaatacgactcacaaccttgctttgccggacggcggcgtgaacgccttatccggcctgcaaatactcgtacgggtcgcggtcttttacatcattacgacgtcaaactgctcctggttataaagcggttcgacctgaactttaacctgtttgccgacaaagatttcgacttccgccagcgcgtgtgattcttcgcctttcagcgcttccgccaccgcaggagaagcataaaccaggaagcgatcggagtcataagcgtgatgaacacgtacaatttcacgcatgatctcatagcagacggtttccaccgtttttaccgtcccgcggccatgacaggttggacattcgttacaaagcacatgttccacgctttcacgagtccgtttacgggtcatttccaccagccccagcggcgaaaaaccgttaatactggttttcacgcgatccttacttaacgcctgttccagcgaatgcagcacccggcggcgatgatcttcattattcatatcgataaaatcgataatgataatgccgcccagattacgcaggcgtagctggcgggcaatggcctgagtcgcttcaatattggtattaaaaatggtgtcgtcgagattacggtgtccgacaaacgcgccggtattgatatctaccgtcgtcatcgcttcggtttggtcgataatcagataaccgccagacttgagttcaaccttacgctccagcgcgcgctggatctcattttccacgtcataaagatcgaagatcggctgatggccactgtaatgctccagcttactggtcatttccgggatgtattctgcggtaaactccagcagcgactcataggtcagacgtgagtcgacgcgaattcggtccaactgcgcatcggcgaaatcgcgcagcacgcgctgcgccagcgccagttcgccatacatctggtagcgcgtttgcggacgctttttgcgctccattactttcgtccagacgcgcttgagataggcggcgtcagacgcgagatcctcttcacacacgccttccgctgcggtacgaataataaacccgccctgttcgtcgcagtattccgccaccacctttttcaggcgctcgcgttcactttcgctttcgatgcgctgggaaacgccaacgtgtgacgcgccgggcataaaaacaaggtaacgggagggcaacgtgatgtccgtggtcaaacgcgcgcctttcgtgccgagcggatctttcactacctgcaccatcagatcctgtccctgacgcaccagttcggagatatcgcgcacggtaaactgtttttgctcgtcgcccgccacgcattcggtatgcggcataatgtcggaagcgtgaagaaatgcggctttatccagcccaatatctacaaaagccgcctgcatacctggaagtacacgacttacacgacctttgtagatattgcctacgattccgcgtcgcgcttcgcgctcaatatggatttcctgaagaataccgccatcaatgtacgccacgcgcgtttccgatggcgttacgtttaccaacaattcagccgtcatgtttatcccttttatcacgcagtgcgttaaaatgactcaacaactcatacgtttcaaccagcggtaagccgaccacggcgtgatagctgccatttatcttcctgacaaaacagccaccccgcccctgaataccgtatgcacctgctttatctaaaggctcgccgctggcgacatagccagtaatatcctgcgcagaaagcgtgcggaaagtcacctccgttaccaccagacaatccagcgtctgctgcgagtccgcaagcgcaacagcagtcatcacctgatgcgtatttccggaaagcaaacgcagcatttctgcggcatgagcggcgtcgcgcggcttttccagcacctcgccgtttaacacgactatcgtatccgcgcccaacaccggcagatcacggggaaccagcgccacgccagcctgcgccttttcgcgcgccagccgaacaacatactgctgcgcgctttcctgagcacgccgttgctcttcaataccaggcacgacctgctcgaatgaaaatccaagttgagtcaataattcctggcgacgcggggaaccggaagcaagatacagagttgtcatatcgacctttattgcacagcaaactgctggcgtactttacgcatcagcaaaaagagccagggccacagcacgccattgactacactactccagaacacttccggtctgaaagagacgttgatcactaaaaactcggcccagaaaacaataatgtccacggccagtgaaagcaacattaccaccagcgcctgctgccagagcgccaggttacggaagagctggaatttcagagcgaccagataggcgacaatactcatcgacagagcgcgcacgccaagtgtggaaccgctgatgagatcaagtatggcacccatcacaaatcccgtccccacatttacgcggtgcggcagggccagaatccagtacagtaagatgagcaaaacccagtttggccggaaaacaatgatgtcgtccggccagggcatgatttgcagcaacagcgcaataagaaacgagagccagataacccagcgcccctggctacgatagctcgccaccattaccctcccggcgcacgcgcaggcggcgtggtcgcgcccgaaggcgatggttgcgttgataccggcgccgtctggcccgcagatggctgagtaatccccgtcgccgggtccggcactggcgccggcggccccatcgcatccggagaaggcaacacctgcggcatcatctgcatcaggcgctcattggcgacgcggtgaacctcttccggcgtcatcggattggcgccgttacgatcggctccccacaacagcagcagatagcgtaaacgctgcaaacccgcggttggacgtgcctgaatgacggtataggcgcgctgagtgtccagcttgacggaggagaccaccgccaccggatacccttccgggaaacgcccaccaagtccggacgttaccagcacatcgccaacgcgaatatcggtattggcgggcagatgttcaagctgaagattgtcagtgcagccgttaccggcggcaatcacgcggatgtcattgcgcagtacctgaatcggcagcgcatgagtcgcatcgcaaatcagcagtacgcgactggtcagtttcgccacggcgacaacctgccctacgacgcctttgtcgctaatgaccggttgaccttcatatacgccattaacgctgcctttatcgataacgacctgatcgctgtaaggatcgttaaccgttgaaataacctgagtcaccattttctgctcgtcctgacgcagcggcgaccccagcagctcgcgcaaccgcgcgttctcctgtttgtactgccccagcatcagcaggtcgctgttttttagcagtaattcctggcgcagcgcccgattttccagctcaagctggtcgcgagaagccagcgtttgcgacacgctgtcgagcagttcacgagggccgtttgaaataaaatagaaaggactgacggcagtgtccatgtacgttcggatttgactgaacgtccccaggcggctgtcggcaatgataacgccgagcgccaccagcaccgccagaataaggcgaatctgtagcgacgggccacggctaaaaattggcttcataggctatgcgtattctcgcgtcggagaggcaggacaatccagggataatcctgcccgtatccaactactcttcgctgaacaggtcgccgccgtgcatatcgatcatttccagcgccttgccgccgccgcgcgccacacaggtcagcggatcttcagcaaccacgacaggaatgcccgtctcttccattaacagacggtcaaggttacgcagcagcgcgccgccgccggtgagcaccataccgcgctcggagatgtctgacgccagctccggcggacactgttccagcgccaccattaccgcgctgacgataccggtcaacggttcctgcaacgcttccagaatctcgtttgagttcagggtaaagccgcgtggaacgccttccgccaggttacggccacgcacttcgatctcgcggacttcgtcgcccggataagcggaaccgatttcgtgtttaatacgttctgcggtggcttcaccaatcagagaaccgtagttacgacgaacgtaattaatgatggcttcgtcgaaacggtcaccaccaatacggacagaagaagagtaaaccacgccgttcagggagatcacggcaacttcagtggtaccaccaccgatatccacaaccattgaaccggttgcttcagaaactggcagacctgcgccgatcgcggccgccatcggctcttcgatcaaaaagacttcacgggcgcctgcgccctgagcggattcacgaattgcgcggcgttctacctgcgtcgcgccgaccggcacgcataccagtacgcgcgggcttgggcgcataaagctgttgctgtgcacttgtttaataaagtgctggagcattttttcggtcacaaagaagtcagcgataacgccgtctttcatcggacggatcgcagcgatattgcccggcgtacggcccagcatctgcttcgcatcatgaccgactgcagccacgcttttcggcgaaccggcacgatcctgacgaatggccacaacggaaggctcattcaatacgatgccttgtccttttacataaatgagggtattcgcggtacccaggtcaatggacaggtcattggaaaacatgccacgaaattttttcaacatactaagggataatcctgaaagctggggcggaaaacaaaatccgcttactttaccaaccacacgcagcagcgacaaggcgcaaaaatcatctgctacggtgaaaattagtgcagttcgtttcctttgttacaaatctcggcctgagtccctcagggctgaaaaaatcagcagcaatcctcgccttcgtttgcaacctgtcaaaggtcattcacctgcatatttgctgcaacaatctggcgagcagacaagcacacccccatgaggcgcagcgcgcgttattctacgtgaaaacaaattaaacggcaggttaaaccgagtatctttgcgaatattttttcacgtttgtgtcaagtagttgggaggaggcaaaaaaatcaccctgcccgccagccacgccgcgttttgtcagcgtctgccactcgccgcgcgaacggacgcctgtcgcgtaaacctgcgtaggcgtgcccgcgcaggcctctaccagactttgaaccagaagctggttttccgttcgcttctcaatgtttctgaccagactcggatgcagcttgagtaattccacattgagcgctttaatccagctcgtgctaaccagcgtcaaacccgcctgtgtcaccgccacccgaacgccaagcgcattgactaagcgaaggatgggttgtaaccgactgatgtgttgacaaacatctgcctccgcaagttcaataattatgcgatttcgctgtgatttttcacactgcattaacgtatcgcgcaaccagcgctgaaaacgcggacgaatcagcgactcaaccgtcaactgcattgccagattttcatccggccagtagcccagcaacgtaatcaggcggctaatttgtaatctgtcatactcttccgataaaccaaattgcagcaccatcggcatatactccgccgagctcacctcttctttaccgtcatagatgcgacacatcaattcccgatgatgtacgcgaccttctcgcgtgaccgctggtttttgataaagtcgcggtccaccccggttcagcatctgctcaatcaatgtgcgccagcgcacattgccgcgccctttttccggcagagtgtcgtcgtagatagcccagctatttcccccctgcagggcggcattccgcgccgcggcttcagcatgttccatcacctgctcggtggactgtccgctgcgccaggcgcaaatgccgatatgtaccatatcgtcacgatcgagcattttgttagccggtagcgcatcgacagcttttaaaagttgtccggcaatactttccgcttctttcagcgttcgatgcggtagcagcacggcaaagtcgctgcggtgataacgcgccagcagcgagccagggtaacgcataataaatgtcgatagcagattgataagcataaacatctgctcttccgcctgattgcctcccaggctgtcgcgcagaagattgaagtctggcaagcggatcatcatcaccacgccatgcactcccactttttcctgatcttccagcagcgtcgccagttggttatcaaagaacagacggttaccgagtccggttttggtgtcctgcgcggcgtaggagcgaatgagggtgtccaggcggctacgctgttcgtgagcaaactgaatttcggaaagcaatacatcaagcgcgctactggtgcgcgctggccattcgtaaacagaaccgcggacattcgccccgcgttcgccgttcagaatacgcgttgagcgaatttccagaagctcttgcccggaaagctgccgctgcagccagcgcaccgataaaaacaaaatcagaacgataaaaccgatcgccagcgttagcggcgccgtggtgatcagtgagtgaaaatagttacccatcgggtcctgataagccagacgtagcgacattcctggatgttttatcagcggtacgaccagctcgcgatacatgtcgctggtgccggctggccgataacctctggcacgagaatggctgtagacgctgcgctccccctgcaacagatcgacacgcacaatatcggaagcgatcatgagttcgtcgatttgcggcgtcagcgagacaatatcatgggtcaccaggtgcgtatcaatggctgtcgccgtcgcctgcacacggctgacatacttatactgtacggcgttataaaagcttagcgagcaacctatcagagtcacgaagatcgttaaccccgtgagcagcgtgataaaagctgagaatttcgtcgttaatcgcatccttgagttaactccgacggttataaacagtatgaaaaagcgaatctgaaggcggaattcgccacggcgcgcaatgaagcaggcatactaccaaaatggatctatctggcaatttattgcgttgcatcggcatcacgttttaattagcgagtatagtcttcgtagctatttttccaatctaccatgtaaagtgaggacaggttatgcaggcgttgatcttagaacagcaggacggtaaaaccctcgcatccgtgcaacatctcgaagagagtcaactgccggcaggtgatgtgacggtggatgtccactggtccagcctgaattataaagatgctctggctatcaccggaaaagggaaaattatccgtcattttccgatgattcctggtattgatttcgccggcaccgttcacgcaagcgaagatcctcgctttcatgcaggccaggaagtactactgactggctggggcgtgggcgaaaaccactggggcggcctggccgaacgcgcacgcgttaaaggcgactggctggtcgcgctgcctgcgggactgagcagccgtaacgccatgatcatcggcaccgccggttttaccgccatgctgtgcgtcatggcgcttgaagatgcaggtattcgcccgcaagacggtgaggttgtcgtcaccggtgccagcggcggcgtgggcagcactgccgttgcattactgcataagctgggctatcaggttgcagcagtatcaggacgtgaaagcacccacggctatcttaagagcctgggagctaaccgtattctcagccgcgatgagtttgctgaatctcgcccgttggaaaaacagctatgggccggtgcaattgataccgttggcgataaagtgctggcgaaagtgctggcacagatgaactatggcggttgcgtggccgcctgcggcctggcgggcggcttcgcgctgccgaccaccgttatgccattcattctgcgtaatgtgcgtttgcaaggggtagactcggtgatgaccccaccggcacgtcgcgcagaagcctgggcgcgtttggttaaggatctgccggaatcgttctatgctcaggccgccacagagattacgctggcggatgcgccgaagttcgccgatgccatcatcaataatcaggttcagggccgtacgctggtgaagataaaataacgtcacgtataaaaaaatttacacttaattaactatttatttttacacattgacacactccctgtcatattcactacacgccatgttgtggtgggtagaccgggagtctgtgatgaaaaagatacgtccattaacagaagccgatgtgactgcggaatcggctttttttatgcagcgccgacaggtgctaaaagcattaggcatcagcgcggccgccttatccttaccctcaacggcgcaggccgatctcttcagttggtttaaaggcaacgatcgtccgaaagcgcctgccggtaaaccgcttgagtttagtcagcctgccgcctggcgaagcgatttagcgttaacgccggaagataaggtgacgggctacaacaatttctatgagtttggccttgataaagccgacccggcggccaatgccggaagtctgaaaaccgaaccgtggacgttgaaaatcagcggggaagtcgcgaagccatttacgctggattacgacgatttaacacatcgtttcccattagaagagcgtatctatcgaatgcgctgcgtcgaagcgtggtccatggtcgtgccgtggattggtttccctttatataagctactcgcgcaggcacagcccaccagccacgctaaatatgtggcattcgaaacgctatacgcgccggatgatatgccaggacagaaagatcgctttattggcggcggactgaaatacccttatgtcgaagggctacgtctggacgaagccatgcatccgctgactctgatgaccgttggcgtctatggtaaggcgttacccccgcaaaacggcgcgcctattcgactcatcgttccatggaagtatggttttaaaggtattaaatctattgtcagcattaaactcacccgcgaacgtccgccaaccacctggaatttgtcggctcccaacgaatatggtttttatgccaatgtgaacccgcatgtggatcatccacgctggtctcaggctaccgaacgctttattggttcaggcggtatccttgatgtgcaaaggcagccgacgctgctgtttaacggctacgccaatgaagtcgcttcgctgtatcgcggtctcaatttgcgggagaatttttaagtgcgtctgacagcaaaacagataacctggctaaaagtttgtctgcatcttgccggttttttgccgcttctgtggctcttttgggcgataaatcacggtggactcagcgcagacccggtaaaggatatccaacactttaccggcagaaccgcgctcaaatttttgctcgccaccttgctggtttcaccgctggcgcgctacgctaaacagccattattgatacgcacacgccgcctgttaggattatggtgtttcgtttgggctacgctgcatttaaccagctatgccttactggaactggggatacataacctggcgctgttaggaagcgagttgatttcacgcccttatttgacgcttgggatcattagctggctggtgttattggcgctgacgttgacctcaacgcaatttgcgcagcgtaaattgggcaaacgctggcaaacactgcataacgtcgtctatcttgtcgcgatcctggctcccatacattacctgtggtcggtaaagattttatcaccgcaaccggtcatctacgcggcattagcgttagcccttttagcgttgcgttaccggaagtttcgccagtggtggcgctagtttggtgaactgtgcggtcgattgcaaaacgcaaaacaggtaatgtcctttttatgtttcgggttgattatcttccctgataagaccagtatttagctgccaattgcgacgaaatagttataatgtgcgactttacattgcccaacggcgattttcgttcgcagaaagggtgacaatcgagcaatgaaggtatattttgttttttgcccgaaaatggcagaagatagccacacaatgactggcaaatcatgaatttcaccttcgggtgctacggcataacaggcaaatcaaagatgcgcggtattttacccgcggcagtcattcacatgctttacagacggcgctaaaacgcctgtcacaatcacactaaacaaagagtacggaacccactcatggatattcgtaagattaaaaaactgatcgagctggttgaagaatcaggtatctccgaactggaaatttctgaaggcgaagaatctgttcgcatcagccgcacaacggcaaacgccggttttccggtgatgcagcaggcttatgcggcgccgatgatgcagcaacccgctctgtctaacgctgtcgcgccagcggctactccagcaatggaagcgcctgccgcagcggaaatcagtggtcacatcgtacgctccccaatggttggtactttctaccgcaccccaagcccggacgcgaaagcgttcatcgaagtgggccagaaagtgaacgtgggcgataccctgtgcatcgttgaagccatgaaaatgatgaaccagatcgaagctgacaaagcaggtactgtgaaagcgattctggtcgaaagtggtcaaccggtagaatttgacgagccactggtcgtcatcgagtaacgaggcgaacatgttggataaaattgtcatcgccaaccgcggcgagatcgcactacgtattcttcgagcctgtaaagaactcggcatcaagaccgtcgctgtgcactcaagcgcggatcgcgatttaaaacacgtattgctggcggatgagacggtctgtattggtccggcaccgtccgtaaaaagttatctgaacatcccggctatcattagcgccgctgaaatcaccggcgcggtggcaatccacccgggttacggcttcctttctgagaacgccaattttgccgagcaggttgaacgctccggctttatctttatcggcccgaaagcggacaccatccgcctgatgggcgataaagtgtccgcgattaccgcgatgaaaaaagcgggcgtgccgaccgtaccaggatctgacggcccgctgggcgacgatatgaatgcgaaccgcgctcatgccaaacgtattggctatccggtgatcatcaaagcgtccggcggcggcggcggccgcggtatgcgcgtagttcgtagcgatgctgaactggcgcagtccatctccatgaccaaagcggaagcgaaagcagctttcagcaacgacatggtatacatggaaaaatacctggaaaatccacgccacatcgaaattcaggtgctggcggacggccagggcaacgctatctatctggcggaacgcgactgttccatgcagcgtcgccaccagaaagtggttgaagaagccccggcgccaggcattacgccggaactgcgtcgctatatcggcgaacgctgcgcgaaagcgtgcgtagacatcggctatcgcggcgcagggacgttcgaattcctgttcgaaaacggcgagttctatttcatcgaaatgaacacccgtattcaggttgaacacccggtgactgaaatgattaccggcgtcgatttgatcaaagagcagttgcgcatcgcggcgggtcagccgctgtcgatcacacaggacgaagttgtcgttcgaggccatgcggtagaatgccgtatcaatgccgaagatccgaacaccttcctgccaagcccaggcaaaatcacgcgcttccatgcgcctggcggctttggcgttcgttgggaatcccatatctacgcgggctacacggtgccgccgtactatgattccatgatcggcaaactcatctgctacggtgaaaaccgcgacgtggcgattgcccgtatgaaaaatgccctgcaggaactgattatcgatggtatcaaaaccaatatcgatctgcagacccgcatcatgaatgacgagcacttccagcacggtggaaccaacatccactatctggagaaaaaactcggtcttcaggaaaagtaatcgcacgttaatctcaaaaggccggtgaatccggccttttttatttctggggatagcgatgccccatcatgtacaattcccgctttcttcacccataagggacaaaaaatggacgctcgttttgttcaggcccataaagaggcgcgctgggcgctgtggctgaccctttgctatctggcggcatggttagtggctgcttacttacctggagactcgccgggaatcaccggtctgccgcactggttcgagatggcctgcttattgacgccgctggtctttattttgctgtgctgggcgatggtgaaattcatttatcgcgatatttcgctggaggatgacgatgcagcttgaggtcattctaccgctggtagcctatctggtcgtggtcttcggggtctcgatttacgctatgcgcaagcgtaccgccggcacctttttaaacgaatattttcttggcagccgttcgatgggcgggatcgtgctcgcgatgacgcttaccgccacctatattagcgccagttcatttatcggcggtcccggcgcggcttataaatacggtctgggctgggtcttgctggcgatgatccagcttcccgccgtctggctttcactgggtattctgggtaaaaaattcgctatcctggcgcgtcgctataatgccgtcacgcttaacgatatgctattcgctcgttaccaaagccgcctgctggtgtggttggcaagcctgagtttattggtcgcgtttattggcgcaatgaccgtacaatttatcggcggcgcgcgactgctggaaaccgcggcgggaattccctacgaaaccggcctgctaatatttggcgtcagtatcgcactctatacggcgtttggcggctttcgcgccagcgtacttaacgatacgctacagggcctggtgatgctggtcggcacgatagtgctgctggtgggcgtgatccatgcggcgggcggtctaagtcaggccgttgacacgctgcacgctctcgaccccaaactggtaacgccgcagggcgccgatgacatactttctcccgcctttatgacctctttttgggtactggtctgttttggtgtgattggcctgccgcatacggcggtgcgctgcatctcctataaagacagtaaagcggtacaccggggcattattatcggtacgattgtcgtggcgattttaatgttcgggatgcaccttgccggcgcgctgggtcgcgcggtgcttccggatctgacggtgccggatctggtgatcccaacgctaatggtgaaagttttgccgccgtttgccgccgggatcttcctcgctgcgccaatggcggcgatcatgtcaacaattaacgcccaactgctgcaaagttccgcgacgatcattaaagatctctatctcaacctgcgccccgatcagatgcaaaatgagatccggctgaagcgtatgtcggcagcgattacattactgctaggcgcgctgttgctgctggccgcatggaaaccgccagagatgatcatttggctcaacctgctggcgtttggcggcctggaagcggtgttcttatggccgctggtattgggcctttactgggagcgggcaaacgcggcaggcgcattaagcgccatgatcgtgggcggcgtgctatatgccctgcttgccacatttaatattcagtacctgggctttcatccgattgtgcccgcgttactgttaagtttattggcttttctgatcggaaaccgattcggctcttccgcttcgcaagccaccgtattgtctactgataaataaagagttttgccatgccatggatccaattgaaactgaataccaccggcgcgaatgctgaagagctgagtgatgcgctgatggaagcgggcgccgtttccattacctttcaggatacgcacgatacgccggtttttgagccgttgccgggcgaaacccgtctgtggggcgataccgatgtgatcggtctgttcgacgccgaaaccgacatgaaagacgttgtcgcgattctggagcaacatccgctgctgggtgccggatttgcccataaaatcgaacaactggaagataaagactgggaacgcgaatggatggataatttccatccgatgcgttttggcgagcgtctgtggatttgtcccagctggcgtgacattccggacgagaatgccgtcaacgtgatgctcgacccgggactggcgttcggtacgggtacgcaccccaccacctctttatgtctgcaatggctggacgggctcgatctcaacggcaaaaccgtgatcgactttggctgcggttcaggcattctagcgattgccgcgctgaaactgggagcggcaaaggcgattggtattgatatcgatccgcaagctattcaggccagtcgcgataatgctgaacgcaacggcgtgtctgaccggctggagctgtacctgccgaaagaccagccagaagccatgaaagccgacgtggtcgtcgctaacatcctggcaggcccattacgcgaactggccccgttaatcagcgtactgcccgttgagggcggtctgctggggctttcaggtattctcgccagccaggcggaaagcgtctgcgatgcttacgccgagcttttcactctcgacccggtcgtcgaaaaagaagaatggtgccgcattactggccgtaagaaataattcttgtcagcgtggtcgcccggccacgcttttctccacacaactgccttaacgcctttcaggcaccgagacatcattaaattcatcaaatgaatgcctgaaataacttctttgtcactatccgtctggataaacagctgctaccagcggacaaaagatactggcgttttaacgggtcgcagccatcgccctcgtacttagtaatgctgtccgggttgttctgcagcatccgctaaccctctcttcagcgcagctggaaaaatttatccgtgccattcatgaacacaaaagcgcatctgtgcgcccccttccgactggcaatggagaaaaatcacgcgcagcgggaagtgatcttgtcctgaaacgagacggcgatcccattcatttggggtaattagcttataaaaaaagcagattattccgcttatcttgtttctggacgaagaaatagagagaagttacgggaatttgtaagcgcgtacaaaaccgccgacaataaataaccctatgattttaatgaattataaatttattttgctgtttttaagcacgattcattgatctacaacagtggattgttcaaagtttggcctttcatctcgtgcaaaaaatgcgtaatatacgccgccttgcagtcacagtatggtcatttcttaactcatgcgcatcggacaatatcagctcagaaatcgcctgatcgcagcgcccatggctggcattactgacagacctttccggacgctgtgctatgagatgggagcaggattgacagtatccgagatgatgtcttctaacccgcaagtgtgggaaagcgataaatctcgtttacggatggtgcacgttgatgagccaggaattcgcacggtgcaaattgccggtagcgaccctgttgagatggccgatgccgcacgtattaacgtggaaagcggcgcccagattattgatatcaatatggggtgcccggcgaagaaagtgaatcgtaagctggcaggttcagccctcttgcagtacccggatttagtgaagtctatactcatcggggtcgtaaacgcagtggacgttcctgtgactctcaagattcgcaccggctgggcgccggaacaccgtaactgcgtagagattgcccaactggctgaagattgtggtattcaggctctgaccatccatggccgcacccgcgcctgtttgttcaacggagaagctgaatacgacagtattcgggcagttaagcagaaagtttccattccgattatcgcgaatggcgacattactaacccgcataaagccagagctgttctcgactatacaggggcggatgccctgatgataggccgcgcagctcagggaagaccctggatctttcgggaaatccagcattatctggacactggggagctgcttccgccgctgccgctggcagaggtaaagcgcttgctttgcacgcatgttcgggaactgcatgacttttacggtcaggcaaaagggtaccgaatcgcgcgtaaacacgtctcctggtatctccaggagcacgctccagacgaccagtttcggcgcacattcaacgctattgaggacgccagcgaacagctggaggcgttggaggcatacttcgaaaattttgcgtaaacagaaataaagagctgacagaactatgttcgaacaacgcgtaaattctgacgtactgaccgtttctaccgttaactctcaggatcaggtaacccaaaaacccctgcgtgactcggttaaacaggcactgaagaactattttgctcaactgaatggtcaggacgttaatgacctgtatgagctggtactggctgaagtagaacagcccctgttggacatggtgatgcaatacacccgtggtaaccagacccgtgctgctctgatgatgggcatcaaccgtggtacgctgcgtaaaaaattaaaaaaatacggcatgaactaatttcgattagctaactgcttgtttaaaaaggcgctactcggcatggggaagcgccttttttatacgcatcacatggaatttggtcatgaaagcggaatgtgaacctcagtactttggcgatgaatcgaagaagattattcacggtgacgcgctaacagaacttaaaaaactgccttctgaaagcattgacttaatttttgccgatccgccttacaatatcggaaaagatttcgacggtatggtggagtcctgggacgaagcgtcttttctggcctggctgtatgaatgcattgatgagtgccaccgcgtactgaagaaacacggcaccatgtacatcatgaatagcacagaaaatatgccgtatatcgatctcaaatgccgaacgctttttaccatcaaaagccgtatcgtctggtcctatgatagttccggggtgcaggcgaaaaaatactttggttctatgtatgaaccgatcctgatgatggtaaaaaacccgaaaagctatacctttaaccgtgatgcgattctggtcgaaaccactacgggcgctaagcgcgcgctaatcgattatcgaaaaaacccgccccaaccatacaatcagaaaaaagtgccgggcaacgtctggtcatttcctcgcgtacgttatctgatggatgaatatgaaaaccatcctacgcaaaagcccagcgcgctgttaaaacggatcatactggcctcttctaacccgagcgataccgtattggaccctttcgcgggcagtttcaccacaggcgctgtcgcagcggcgtcaggtcgtaagtttatcggtattgaactcaataatgagtacgtaaaaatggggctcagaagattgagcgtcacttcgcattattcagaaaatgaacttgcaaaagtcaaaaagagaaaaacacaaaacctgtccaaaaagcagcgaaatgtcgggataaacgcgctatcttcagagaagtaaaagcattgtaagtccgcttttcagcgtcaaaatttcatgtatattcccagcacgcatgggcatgaatacacaggatttgacgatgatacgtaagtattggtggctggttgtttttgccgtctccgtttttctttttgatgcgcttttgatgcaatggatcgaattgatggcaactgaacaggataagtgccgaaacatggattcggttaaccctctcaaattgatcaattgtaccgatctggagtagcgaaccgggcgatttaacctatgattatttatcacccggatttcttttatcccttataaaaacagggaattaaaacacgttgaggataaaagaaggggtgatactgtctcgtcctgttcttttcctgcataaccaatgagctaatgatacatgccggttagtgagtacaaccacatccttgtggcggtttcatttgctgtcgctatttttgcgtcctataccgcattaaatatggccggacgcgtagccggaagcgcccgatcaaacgccagaatatggctaatgggcggcggcttcgcgctgggcgtcggtatttgggcgatgcattttgtcgggatgctggcgatggatcacgcgatgaacatgcgcttcgatccgttcctcaccggcctctccatgctgatcgcgatcggctcctccctgtttgcgctatggctggtcagcgctgaaaaactgcgcctgcgccgtttactgccgggcgcgctggtgatgggactgggcatcagcgcaatgcattataccgggatggcggcgctgcaatttgcttccattatcgtctggaatagcgcgtgggttgccctctctatcattatcgcgctactggcgtcctgcggcgcgctgtggctcacgttccgcctgcgtcatgagggaacagatgtcgccctgaggcgagcaggcgccgcggtattaatggggatagctatcgccggcatgcattacgccgacatgaaggccgcacactttccccaaaactggccgatggagcatcgtggcgtcgatagcaactggctggctgttcttgtcagcgtggtcgcgctgactatcctgggtattactctgctggtttctttatttgacgcccggcttcaggcccgtaccgcactacttgcctcttcgctggcgcaggcgaaccaggaactggcgcagttggcgctgcatgatacgctcacccgtttaccaaaccgggtgcttcttgaggatcgtctggaacaggccatcagcaaagcgaatcgggaaaacacgtctttcgcgctactgtttatggatctggatggctttaaaaccgttaatgacgcttatggtcatgatatcggcgataagctactggtagcggtcacgcatcgtctgaaccaaccgctgagcgggcagtttaccctggcgcggattggcggcgacgaatttgtgctgcttgcagaagtcagcgcgcctgacgaagcggcttcccttgccagcgcgctggtacattcgatagatgcgccctttacaatagatccgtacgaactggtcgtcacccttagcgtgggaatagcgctctatccgctggacggaaaaaacgaacgggaactgatgttcaacgccgatgccgcaatgtaccacacgaaacatacggggcgtaacggataccatttctttcagccatcaatgaatatgctggcgcaaacccaacttcagctaatgaatgacctgtggctggcgctggaaagacaagagctcaggctagtgtatcagcctaaatttcaggctcctgccggccctattgtaggatttgaggccctgttgcgctggtatcatccaaaacaaggcgtactgaatcctgaccagtttttaccgctggcggaaaaaacgggtcttatcgtcactatcggtagctgggtgatagacgaggcgtgtcgacagctccgcgagtggcacttacagggatacgacttatggtcagtggcggtaaatctgtccgccttacaatttgagcagcccgggcttgtggacaccattacgcggagcctggcccgacacagtatccgtcccgatttattgattctggaaatcaccgaaaccacggcgatgaacaagccagagcaaagcgtcgctatactcaccagattaacggaaatgggggttaaggcctctattgacgactttggcaccggttattccagccttctctatctgaaacgtcttccggcgtgcgaactaaaaattgatcgcgctttcgtacatgaactcagcgaggcaggcgacggcgcgaccattgttgcggctattgtcgcgctggcgaaagcgttaaatctgcaaattgtggcagaaggggtagagaatgaaacgcagcaacaatttttgacccagttaggatgccatacgcttcaggggttcctgcttggcaagccgcgtacggcagaggaaattgctcgcgatattcgggatcctgccaatatattcacaaggtcaatatataatatcaactcaaaataatctcaggcttcttccgcctgttgttcatttggcattaattgcctcacactgccatccgggcttagcatttttaatacattatcgactaatgcaggcgcctgcttataaagatcataacttgtgggattcattaaccagttttttactattccgctaaaactaccatgcagaataattaatatgacatccagatcaagactgcctgagatcagttttttatccatacatcgctgtaatacttcaagcagcgactgatgatggaaacccatcttctcccgaatggcctgttccgatatcataccattatggaattcacatttatgatataaaatctgcattaatgcctgctgacgaggcactgccgcaatatattgtaaggctgcaataaatttctctcgtagatcctgtaaaggattatcattccagcatcccgtaagcctatcctgaataagttcgcgtaaaggtggttgctgtaaccaaacctcattaaacaactgcgttttattctcaaagtgccagtagatggcgccccgcgtgacatcagcggcatcagcgatatcattcaacgtcgtgttggcaacgccgcgcaaagcgaactgcgcaatagcggtttcaatcaaatgttgccgcgttttaagcgcatccgccttcgttttcttcgccataattaagatatcctggaccataaaaacgataaatacgctgataaaatactcagcacaaaaaacaactttatcatgtcctttttagtcagacgagagacagctatttttatttcgcacaatatcgccaaatcaataataaaaacaaataaattaataaaacacattcatataaaatatatatttctatttatgttattcaacatcatgattttactaatcgggacattatgaaacgacagggaatagttctttttttttgcttttatgtgccgtgaaccccatcccaaaataagtattgcttacatcacaagctaataatttgtaggataccccactgctattctatttttcgcgcgttaacgccttaccgttatccggtgaataacgagctttcggttttttaaggaacagtaatgacgaaacatgccaggttttcactcctgccctcattcatcatattctctgctgcgctgctggccggttgtaatgaccagggagatacccaggctcatgccggcgagccgcaagtcaccgtccatgtggtcgaaacagcgccgctagccgtaacgaccgaacttcccggacgtacgtccgcatttcgcattgcggaggttcgcccccaggtgagcgggatcgtgcttaaaagaaacttcaccgaaggtagcgatgtagaggccgggcagtcgctctatcagatcgatcctgccacttatcaggctgattatgacagcgctaaaggcgaacttgctaaaagcgaagcggctgcggctatcgcgcacctgacggtcaaacgctatgttccactggtcggcacaaaatatatcagccaacaggaatatgatcaggcgattgccgacgcccgccaggccgatgccgccgttgtggcggcaaaagccgctgttgaaagcgcgcgtattaaccttgcgtataccaaagtcacctcacccatcagcgggcgtataggaaaatctaatgtgactgaaggcgcgctggtgactaatggtcagtcaactgaactggctaccgtgcaacaactcgatccgatttatgtcgacgtgacgcaatcaagcaacgactttatgcgactcaagcaatccgtcgaacaaggtaacctgcataaagacagcgccagtagcacggttcaactggtaatggaaaatggtcaggtctacccgattaaaggcacgctgcaattttccgacgttaccgtagatgaaagcaccggctctatcacgctcagggcggtgttccctaacccgcaacacagtctgcttcccggtatgtttgttcgcgcccgcattgatgaaggcgtccagcccaatgccatccttgtcccccagcagggcgtaacccgcacgccgcgcggcgacgcaatggtgatggtggttaacgataaaagccaggtcgaagcccgcaatgtcgtggcggcgcaggctattggcgataaatggctcatcagcgaagggttaaaaccgggcgataaggtcatcgtcagcggcttacaaaaagcgcgaccgggcgtccaggtgaaagccactaccgatgctcctgcagcgaaaacggcgcaataaggtaaccgtacatggcaaacttttttattagacgtcctattttcgcctgggttctggccattatcctgatgatggctggcgcactggcaataatgcaacttcccgttgcgcagtatccaaccattgcgccgccagcggtttctatttctgcaacctatcctggcgcggatgcgcagacggtacaggatacggttactcaggttatcgaacaaaatatgaacggtatcgataacctgatgtatatgtcctctaccagcgactctgctggtagcgtgaccatcaccctgaccttccagtccggaaccgatccggatatcgcgcaggttcaggtgcaaaataaattgcagctcgccacgcctttactgccgcaagaagtccagcagcaggggattagcgttgaaaaatccagcagcagctttttgatggtcgccgggttcgtctcagataatccgaacactacccaggacgacatctctgactatgtcgcctctaacattaaggattctatcagccgtctgaatggtgtgggcgacgttcagctatttggcgcacagtacgccatgcgtatctggctggatgcgaatctgctaaataaataccagctcacgccagttgacgtcatcaaccagttaaaagtacagaacgaccagattgcggcaggccaactgggcggcacgccagcattaccgggccagcagcttaacgcctcaatcatcgcccaaacgcgtctgaaagatccggaagagttcggcaaagttacgttgcgcgtcaataccgacggctctgtcgtccatctcaaagatgtcgcgcgtattgagcttggcggtgaaaactataacgttgtagcgcgcattaacggtaaaccggcctccggtctcggtattaaactggcgaccggcgctaacgcgctggataccgcaaccgcaatcaaagtgaaactggcggagctgcagcctttcttccctcagggaatgaaggtggtttatccttatgacacaacgcccttcgtaaaaatatctatccacgaagtggtaaaaacgctgtttgaagcgattattctggtgttcctggtaatgtatctgttcttacagaatatccgggcaaccctgattcctaccatcgctgttcctgtcgtgttgctaggcacttttgcggtactcgccgcctttggctattccatcaataccctgacgatgtttggtatggtactggcgatagggctgttggttgacgatgcgatagtggtcgtagaaaacgttgaacgtgtaatgatggaggataacctttctccccgagaggcgacggaaaaatccatgtcgcagattcagggagcgctggttggtatcgcgatggtactgtctgcggtatttatcccgatggccttttttggcggctcgaccggggcaatttatcgccagttctctattactattgtttcagcaatggcgctatccgttctggttgcgttgattctgacgccagcactgtgcgctacgctgcttaaacccgtatctgctgaacatcacgagaaaaaaagcggcttctttggctggttcaataccaggtttgaccacagcgttaaccactatactaacagcgtaagcggcatcgtgcgtaatacgggtcgctatctcattatctatctacttattgtagtcggaatggcggttctgtttttacgcctcccgacctccttcctgccggaagaagatcagggagtattcctgaccatgattcagctcccctctggcgctacgcaagaacgtacgcagaaagtgctggatcaagtcactcattactacctgaataatgaaaaagcgaacgtcgaaagcgtgtttaccgtaaacggctttagctttagcggtcagggacaaaactcagggatggcatttgtcagccttaaaccctgggaagagcgtaacggtgaagaaaatagcgtcgaagccgttatcgccagagcgacacgcgcctttagccagattcgcgacgggttggtgttccccttcaacatgccggcaattgtcgagttaggtaccgcaacaggtttcgacttcgaactgattgatcagggaggactcggtcacgatgcgttaacaaaagcgcgtaatcaactcctgggtatggtcgcgaagcatcctgatctattagtgcgcgtacgcccgaacgggctggaagacacgccacagttcaagctggatgtcgatcaagaaaaagcgcaggcgctcggcgtttcgctgtctgatatcaacgaaaccatctccgcggcgttgggcggctattacgttaacgactttatcgatcgcggacgagtgaaaaaagtatacgttcaggctgacgctcagttccgtatgctgccgggagatatcaacaatctttatgttcgcagcgctaatggcgagatggtgcccttctctacctttagctcagcacggtggatttatggttcgccacgcctggaacgctataacgggatgccgtcaatggaactgctcggcgaagcagcacccggacgaagcaccggtgaagccatgtcgttaatggaaaacctggcttcacagctaccaaacggtattggctatgactggacaggtatgtcgtatcaggaacggttgtcaggtaaccaggcgccggcgctgtacgcaatctcactcattgtcgttttcctctgccttgccgctctgtatgaaagctggtcaattccgttctcggtaatgctggtcgtaccgctcggcgtggttggcgctctgcttgcagcgtcattgcgcggtctgaacaatgacgtttacttccaggttggcttgttaaccactattggcctttctgctaaaaacgccatcctgattgtcgagttcgccaaagatctcatggaaaaagaaggacgtggattgattgaagcgacgctggaagcatcccgtatgcgtttacgtcctattctaatgacctcgctggcctttattctcggggtaatgccgttagttatcagtcgtggcgcaggtagtggtgcacagaacgcagtaggcacaggggttatggggggaatgttaaccgcaaccttattagctatcttcttcgtgccggtattcttcgttgttgtaaaacgccgatttaatcgccatcatgattaaccggtaaacagaggcgtcttcggacgcctttttaaacggtacgtctttatctccgctattccccctctccgcttacctctgcattctccatagtttttacaattcacatgaattgagatgattcctcatgtcggccattttttctgtggtggtaaaataactctcgttttcgcagcggttagagccagcattacgttgctgtacttcgcgaaacgctgattaatgaggtaacaccatgaaaagactaattccagttgcattgcttaccaccttattggcaggttgtgcacatgattctccctgcgtaccggtttatgacgatcaagggcggctggttcataccaatacatgtatgaaaggtacaacgcaggataactgggagacagcaggcgctattgctggcggcgctgcggcggtagcagggttgacgatgggtatcattgcgctttctaaatgatacatgcaggcgcggcaatgccgcgctttcagtaataatataaaggtcgtaaggatactcagcgacgtaatctgttcagcctgtcccccgaaagttaacacgataaaacgctctcttttcttactcgcccatcccgatggtatttattctattccttgtccgatgcagacaaaattatagcttgatagcatcgtaagccgcattacaaacaggctttatacagtaagacttagagcgtgatcattaggcgtaattattacagacagtctggatataaaccggaacatacacgtaatacatgaggattttgagcactgtccctaggccaaactggcaaataaaatagcctaatgggccagatttttagtcctcagcgaatatctctattgcttattagaggcgtaagtaaaagccgtttgtacatctacttcagcacggttcacattcgatggttcaggcggatatatggtgggaaatcacgttgactaaaacggtttttatccactctacgaagatgtttaaaacgcgtcggcgtcattatccgataactttttccatagagagataaatgcaaaaaggcccagtctttcgattgggccctttgctttatttgatgtctggcagtttatggcgggcgtcctgcccgccaccctacgggccgttgctgcgcaacgttcaaatccgctcccggcggatttgtcctcctcaggagactactcaccgacaaacaacagataaaacaaaaggcccagtctttcgactgagccttttgttttatttgatgtctggcagttccctactctcgcatggggagaccccacactaccatcggcgctacggcgtttcacttctgagttcggcatggggtcaggtgggaccaccgcgctactgccgccagacaaattctttttcaaataccgaactttaaccgtattaagtggtgctgatacccagagtcgaactggggacctcacccttaccaagggtgcgctctaccaactgagccatatcagcacactaaatttgatgcctggcagttccctactctcgcatggggagaccccacactaccatcggcgctacggcgtttcacttctgagttcggcatggggtcaggtgggaccaccgcgctagtgccgccaggcaaattctgttatcagaccgtttttacgttctgatgtaatctgaatcagtgctgaaaatcttctcttaaccgccaaaacatcttcggcgttgtaaggttaagcctcacggttcattagtaccggttagctcaacgcatcgctgcgcttacacacccggcctatcaacgtcgtcgtcttcaacgttccttcaggagactctaagtctcagggagaactcatctcggggcaagtttcgtgcttagatgctttcagcacttatctcttccgcatttagctaccgggcagtgccattggcatgacaacccgaacaccagtgatgcgtccactccggtcctctcgtactaggagcagcccccctcagttctccagcgcccacggcagatagggaccgaactgtctcacgacgttctaaacccagctcgcgtaccactttaaatggcgaacagccatacccttgggacctacttcagccccaggatgtgatgagccgacatcgaggtgccaaacaccgccgtcgatatgaactcttgggcggtatcagcctgttatccccggagtaccttttatccgttgagcgatggcccttccattcagaaccaccggatcactatgacctgctttcgcacctgctcgcgccgtcacgctcgcagtcaagctggcttatgccattgcactaacctcctgatgtccgaccaggattagccaaccttcgtgctcctccgttactctttaggaggagaccgccccagtcaaactacccaccagacactgtccgcaacccggattacgggtccacgttagaacatcaaacattaaagggtggtatttcaaggtcggctccatgcagactggcgtccacacttcaaagcctcccacctatcctacacatcaaggctcaatgttcagtgtcaagctatagtaaaggttcacggggtctttccgtcttgccgcgggtacactgcatcttcacagcgagttcaatttcactgagtctcgggtggagacagcctggccatcattacgccattcgtgcaggtcggaacttacccgacaaggaatttcgctaccttaggaccgttatagttacggccgccgtttaccggggcttcgatcaggagcttcgcttgcgctgaccccatcaattaaccttccggcaccgggcaggcgtcacaccgtatacgtccactttcgtgtttgcacagtgctgtgtttttaataaacagttgcagccagctggtatcttcgactgacttcagctccatgagtaaatcacttcacctacgtgtcagcgtgccttctcccgaagttacggcaccattttgcctagttccttcacccgagttctctcaagcgccttggtattctctacctgaccacctgtgtcggtttggggtacgatttcgtgttacctgatgcttagaggcttttcctggaagcagggcatttgttgcttcagcaccgtagtgcctcgtcgtcacgcctcagtgttaaagtgaaccggatttacctggaacacacacctacacgcttaaaccgggacaaccgtcgcccggccaacatagccttctccgtccccccttcgcagtaacaccaagtacgggaatattaacccgtttcccatcgactacgcctttcggcctcgccttaggggtcgactcaccctgccccgattaacgttggacaggaacccttggtcttccggcgagcgggcttttcacccgctttatcgttacttatgtcagcattcgcacttctgatacctccagcatgcctcacgacacaccttcacaggcttacagaacgctcccctacccaacgaacgtatccctaagccaactcgactttaatgaacgctttgacgtcgcttcgctccgtcaatcgtcaactccgtaaagttgtcttgggtgatacgttcgctgccgcagcttcggtgcatggtttagccccgttacatcttccgcgcaggccgactcgaccagtgagctattacgctttctttaaatgatggctgcttctaagccaacatcctggctgtctgggccttcccacatcgtttcccacttaaccatgactttgggaccttagctggcggtctgggttgtttccctcttcacgacggacgttagcacccgccgtgtgtctcccgtgataacattctccggtattcgcagtttgcatcgggttggtaagccgggatggccccctagccgaaacagtgctctacccccggagatgaattcacgaggcgctacctaaatagctttcggggagaaccagctatctcccggtttgattggcctttcacccccagccacaggtcatccgctaatttttcaacattagtcggttcggtcctccagttagtgttacccaaccttcaacctgcccatggctagatcaccgggtttcgggtctataccctgcaacttaacgcccaattaagactcggtttccctccggctcccctatacggttaaccttgctacagaatataagtcgctgacccattatacaaaaggtacgcagtcacaccccgaagggtgctcccactgcttgtacgtacacggtttcaggttctttttcactcccctcgccggggttcttttcgcctttccctcacggtactggttcactatcggtcagtcaggagtatttagccttggaggatggtccccccatattcagacaggataccacgtgtcccgccctactcatcgagctcacagcacatgcgcttttgtgtacggggctgtcaccctgtatcgcgcgcctttccagacgcttccactaacacacatgctgattcaggctctgggctcctccccgttcgctcgccgctactgggggaatctcggttgatttcttttcctcggggtacttagatgtttcagttcccccggttcgcctcattaacctatggattcagttaatgatagtgtgacgaatcacactgggtttccccattcgggtatcgccggttataacggttcatatcaccttaccggcgcttatcgcagattagcacgcccttcatcgcctctgactgccagggcatccaccgtgtacgcttagtcgcttaacctcacaacccgaagatgtttctttcgattcatcgtcgtgttgcgaaaatttgagagactcacgaacaactttcgttgttctgtgtttcaattttcagcttgatccagatttttaaagagcaaatatctcaaacgtgactcgtaagtcagttttgagatattaaggcaggtgactttcactcacaaaccagcaagtggcgtcccctaggggattcgaacccctgttaccgccgtgaaagggcggtgtcctgggcctctagacgaaggggacgtatcagtctgcttcgcaagacgccttgctatttacttttcatcagacaatctgtgtgagcactgcaaagaacagttctttaaggtaaggaggtgatccaaccgcaggttcccctacggttaccttgttacgacttcaccccagtcatgaatcacaaagtggtaagcgccctcccgaaggttaagctacctacttcttttgcaacccactcccatggtgtgacgggcggtgtgtacaaggcccgggaacgtattcaccgtggcattctgatccacgattactagcgattccgacttcatggagtcgagttgcagactccaatccggactacgacgcactttatgaggtccgcttgctctcgcgaggtcgcttctctttgtatgcgccattgtagcacgtgtgtagccctggtcgtaagggccatgatgacttgacgtcatccccaccttcctccagtttatcactggcagtctcctttgagttcccgacctaatcgctggcaacaaaggataagggttgcgctcgttgcgggacttaacccaacatttcacaacacgagctgacgacagccatgcagcacctgtctcacagttcccgaaggcacaaatccatctctggattcttctgtggatgtcaagaccaggtaaggttcttcgcgttgcatcgaattaaaccacatgctccaccgcttgtgcgggcccccgtcaattcatttgagttttaaccttgcggccgtactccccaggcggtctacttaacgcgttagctccggaagccacgcctcaagggcacaacctccaagtagacatcgtttacggcgtggactaccagggtatctaatcctgtttgctccccacgctttcgcacctgagcgtcagtctttgtccagggggccgccttcgccaccggtattcctccagatctctacgcatttcaccgctacacctggaattctacccccctctacaagactcaagcctgccagtttcgaatgcagttcccaggttgagcccggggatttcacatccgacttgacagaccgcctgcgtgcgctttacgcccagtaattccgattaacgcttgcaccctccgtattaccgcggctgctggcacggagttagccggtgcttcttctgcgggtaacgtcaattgctgcggttattaaccacaacaccttcctccccgctgaaagtactttacaacccgaaggccttcttcatacacgcggcatggctgcatcaggcttgcgcccattgtgcaatattccccactgctgcctcccgtaggagtctggaccgtgtctcagttccagtgtggctggtcatcctctcagaccagctagggatcgtcgccttggtgagccgttacctcaccaacaagctaatcccatctgggcacatctgatggcaagaggcccgaaggtccccctctttggtcttgcgacgttatgcggtattagccaccgtttccagtagttatccccctccatcaggcagtttcccagacattactcacccgtccgccactcgtcagcgaagcagcaagctgcttcctgttaccgttcgacttgcatgtgttaggcctgccgccagcgttcaatctgagccatgatcaaactcttcaatttaaaagtttgatgctcaatgaattaaacttcgtaatgaattacgtgttcactcttgagacttggtattcatttttcgtcctaggacgttaagaatccgtatcttcgagtgcccacacagattgtctgataaattgttaaagagcaggtgcgacgcggcttgcagctcaccgtcgcgaggtggcgtatattacgctttcctctttcagagtcaaccctgaatttcaggatttttctcttcaaccgaccggctgtttgtgtgaagtgattcacatccgccgtgtcgatggaggcgcattatagggatcccatttttttgcacaagcgttttttggatctttttttctgtttgttgatttttcatccctttcgctccattcctgcgcaaagtggcgattttttgatgctatctccccttgcacaacgccgttaaagcaaccaaagtcttcatgactattcatttatgatgaggtagacatgtctgacacattacgtccttataagaatctttttcctggtatcggtcagcgcgtgatgatcgataccagcagcgtggttattggcgatgtccgtctggcggatgatgtcgggatctggccgcttgtggtgattcgcggcgatgtgaattacgttgcgataggggctcgtacgaacattcaggatggcagcgttcttcacgtaacccacaagtcttcatccaatccacacggcaacccattaatcattggcgaagatgttaccgttggccataaagttatgctgcacggctgtaccatcggtaaccgcgtactggtcggtatgggctccattgtgctggatggcgcgataatagaagatgacgtaatgattggcgcgggaagcctggtgccgcagcacaaacggctggaaagcggctatttatatcttggcagtccggtaaaacagatccgccccttgagcgatgctgagagatcgggcctgcagtactccgccaataactatgtaaagtggaaagacgactatctttctcaggataaccatatccaaccgtgatcatcttcctgctgggccaggattaatgcttccgcctcttcttccaggtcccagcgatactcacgaaaaatggccagccattgctccgctgtttctccaccaaagcgatacgccagtacatctttttttattgcacacgtgagttgcatcccattaaccagggcgggaaagatgatagcactggcggcagtatcccattcttcgcggtcaggaaattgtatggcctggttcacgctaataattcctgctgtagctgctcaatcactggctcgacctgcggtaatacaccgtgccaaagcaaaacggcatgtgcagcctgccccaccagcattcccagcccatctgcgtagcgttttgcgccctgttgtacacaccaggagagaaatggcgtattccctttttgatagaacatgtcatagcaacagagggaagggtgaataagtgacgctggtatcgccgggatttcgccccgtatgccgctggaggtcgcattaataattaggtcaaactcacaaccatccagcttgtccatatccgtggcatgaacgctgccggtatgagcaaagattttcgccaacgcttcggcacgtgaagctgtacggttggtgatagtgaccgcgcaatccaaagaaagcagaggtaacagcacgccccgggatgcgccgcccgcgccaatcagcaaaatacgcaatcctgggcggataaaatttaaacgttcgagatcgcctaataaaccgataccgtcagtattgtcgccaagcaaacgaccatcttccagccgttttaatgtattgacggctcccgccagcgatgctcgttccgttaactcatccgaacgcgcaaacgcctcctctttaaaaggtactgtgatgtttgcgccttttccccctgccgcgaaaaaggcatcaagcgtattaatgaaattattaataggggccagcacgcgaccataggggtgaacaatatctagctgctgagcaaattgctgatgaataaatggcgatttgctgtgcgcaatcggatttccaaaaacagcataggtttccatcatattacccctgtcgaaacagttcgcccgtcagagcatcgcgaatttctgaaggatttaaacgcccacccgttgcgccttcaaccaccggaaaatcatcaccaaattgcgcacgcacctcttcaacggtacggcatggcggtaatccgctcagattggcgctggtggaaaccagcggtttgccatacgcattgcatagcgcgaccaccagcgggtggttggtaacacgaacggccagggaatcaaaacgtcccgtgagccaccgcggcgttgtcgcgggcgcaggaaaaacaaacgttaccggcccgggccagcaatcaaataccgctttacgctgtgcggcggtaagtatgctgtcatcaatataaggttttaactgctcaaagctggcggcaatcaaaatgagtcccttatcgacgggccgttgttttaacgccagcaggcgcgtaacggctgtttcactatcgggatcgcagccgacgccgaaaacggcttctgttggataagcgatgacattttctttattcaggagatctaccgctgcggcgatagatcctattggcaggttattattcacttgtttattccaccggaaccggctttccacattgtttactggcgcaaaagcgcttcacgccctgcgcggttttcttttcgatgagtagcggataatggcactcggggcattcccctgcaaccggtgtgaagttaatgacaaactgacattccgggtagcgatcgcaggaatgaaagattttaccgtaacgagaacggcgctggaccaaatgtccttgctggcaggctggacaggcaatcgccgtttcatccggtttatcaataaccactgtatgttcacattgcggatactgactgcatccgatgaacatgccaaagcgcccctgacgcaacaccagcacggcgccacactcagggcacagttgcccctccagaattttaacgatatgtccgtccgcctgacttttcagcggacgaacgtaatcgcattccggatagcgagaacagccgagaaacggaccatgtttcccggaacgaattaccagttcggccccgcactgcgggcagggctcatttttacgcaccgaaaacagtgctgatttagccatattcactcatgcagcattaacacctatcaatgcagcataccttcatttacctcaaagagtaattcttccatttgctgataggcgttttcacagcccggaatgttgaataacaccatcaaaataacccatttcaagtcttccaggtcaaactctgcggtatccagcgccagcacacgctcaatcaccatttctcgtgtttcgaggtttagcacctgaatctgctcaaggaataacaggaacccccggcaactggcatcaagcctttcacactcttcaaccgtataaatgcgcattgaaagagggtcggaagcaagttgcatgggttccgcgaggccatcctgatagtcagcgagtttttccagccacagcagcgcattgtagatgtcttcgcgatcaaacccagcgtcggtgagatcacgctccagtctgtcctgatccacgcgcagctcggcttcgttatggatgtatgtttcaaacaaatacattagtacgtcgaacatggcttgccctccttaatcggacatagccgccgggtacagctgcgatccatcctgctaactccagttcgagtagctgagccactaccgctggcacaggttggccggcacgttcagcgacgacgtcaacaggtgttacctcatctcctacgttagccaggagctcaggaaatggcaatgccgcctcatcctgatttagtgaataaagtgaattttccgccgtagttggcaaccagtgtaagccgtattgcaaattttccagaatatcctccggcgtcgtcacaagcgtggccccttgtttaattaaccagtgcgtgccttcgcttcccggactaccgataggacctggtaatgcaaaaacgtcccgcccctgttcaagcgcgcagcgcgccgtcaccaacgaaccgctgcgcaacgccgcctcgattaccagcacgcctttgctcagtccgctgatgatacggtttctgcgaggaaaatgttgcggtagcggaggcgttgaaagcggaaattctgagaccactgcgccgccggtggcaatcaagttttcagccagcatggcatgtcggcgaggataaatctttgccaagccattccctaacaccgctacactttttccccccatactcaccgcggcgttgtgtgctacgccatcaattccccgggcaaggccgctggtgatcgtcaaaccgcttttcgcaaggctttcgcaaagcagacgtccccagcgttctccataccaggagtggctccggctccctacgacggcaagttggcaggtatgcagacaggcaggatcgccgtcaataaaaatagcgccgggataatcgtcaatagcacgcagttggggaggataaatctcactatccgcacacagaaaatggtgctgcggtagttcaagccagcgtaatgtctcatcaagcacacctgctggaagctgtaaaaaacgttcagcttgccgcgcggtaagaccagcctcctgaaggtgcgtgcgatttatctgaggctggcgaataagcgagttcgccatgttcaacatcgcctcgccataaaggtcgccgacgtacattaaacgtaaccaaatttcggtacgggccatcctttccctcccctgccacaagcagtctgaacaatctttgcgattggtcactgatgctgtcaatcaggtggggatttgtctagaatagaggtaataatcttttcaactcctgaacacaactctggataattatgtcagttttgcaagtgttacatattccggacgagcgccttcgcaaagtcgcaaagccggttgaagaagtgaatgcagaaattcagcgtatcgtcgatgatatgttcgaaacgatgtacgcggaagaaggtatcggtctggccgcaacgcaggtcgatatccaccagcggatcatcgtgattgacgtttcggaaaaccgcgacgagcgcctggtactcattaacccggaattgctggagaaaagtggcgaaacgggtatagaagaaggctgtctgtcgattccggaacagcgcgctttagtgccgcgcgccgagaaagtgaaaatccgcgcgctggatcgcgacggcaacccgtttgagcttgaagcggatggtttgctggcaatttgcattcagcatgagatggatcatctggtcggtaaactgtttatcgattatttgtcgccgctgaagcaacaacgtattcgtcagaaagtagaaaaactcgaccgcctgaacgcccgggcttaaaggacaagaaccaacgtgtcagattcactacgtattatttttgcgggtacacctgactttgcagcgcgtcatctcgacgcgctgttaacttctggacataacgttgtcggcgtatttacccaacccgatcgtccagcaggtcgcggcaaaaagttgatgcccagcccggtaaaagtgctggcggaagaaaaaggcctgcccgttttccagcccgtgtcgcttcgtcctcaggaaaaccagcatctggtggctgacttacatgccgacgtcatggttgtcgtagcatatggtctgattctcccaaaggcagtgctggatatgccccgtctcggatgtatcaacgttcacggttcgctgcttccacgctggcgcggcgcggcgcctattcagcgctcactctgggcaggcgatgcggaaaccggcgtcacaattatgcagatggatgtagggctggataccggcgacatgctgtataaacttgcgtgcccgattaccgcagaagataccagtggctcactgtataataagttggctgaacttggcccgcaggggttaattaccacactaaaacaactggcggacggcacagcgacgcctgaagcgcagaatgaagcgctggtcactcatgcggaaaagctcagtaaagaagaagcgcgtatcgactggtctctctccgcagcacagctggagcgttgcattcgcgcctttaatccgtggccaatgagctggctggaaatcgacggccagccggtaaaagtctggcaggcgtccgtcattgaggacgccacgcagtcgctgccgggaaccattctggccgcgacgaaacagggcattcaggttgcaacaggcaaggggatattaaatttgctttcgcttcagcctgccggcaaaaaagcgatgagcgcccaggatctgttaaattcacgccgggaatggtttattcctggtaaccgtcttgcctgacggtcacgtctttataagcccggtgttaccgggcatttttattttatacatatgaaaaaacaaaacaatttacgtagtctggcagcacaggccgttgaacaggtcgtcgagcagggacaatcattaagtaatgtgctcccgccgctgcaacaaaaagtcgccgataaagacaaagcgctacttcaggagctgtgctttggcgtactgcgcaccctttcacagctggaatggctgatcaataagctgatgtctcgtccaatgaccggcaagcagcgtacagtgcattacttaattatggtcggcttttatcagttgctgtacacccgcgttcctccccatgcggcgctggctgaaaccgttgaaggcgcggtctccatcaaacgtccgcagttgaaagggttaattaacggcgtcctgcgccagttccagcgccagcaggaaacgttgcttaatgagtttgcgaccagcgatgcgcgctttttacatccaggttggctggtaaagcgtttgcaaaatgcttaccccacacagtggcaacacattattgaagcgaataaccagcgtccaccgatgtggctacgtgtaaatcgtacacaccacacccgcgacggttggcttggcttacttgaagacgcaggcatgaagggatatccccatcccgattatcccgacgctgtacgtctggaaacgccagctccggtacatgctttacccggttttgctgagggttgggtaactgtccaggatgcctctgcgcagggatgtgcggtttttctcgctcctcagaacggtgagcacattttagacttgtgcgccgcgcccggcggtaaaaccacgcatattctcgaagtggcccccgaagcagacgtgttggcagttgatattgatgaacaacgactctcccgcgtttacgacaacctaaagcgtcttgggatgaaagcgacagttaaacaaggggatggacgttatccctcccaatggtgcggcgagcagcagtttgaccgtattctgctggatgcgccctgctccgcaaccggcgtcattcgccgtcatccagatatcaaatggctgcgtcgcgatcgcgatatcgcggaactggcgcaattacaggcggaaattcttgatgccgtctggccgcgcctgaagcccggcgggacgctggtttacgccacctgttccgtactgccggaagaaaaccgcgatcagatcaaaacctttttacaacgcactcccgatgccgcgctcagcgaaacgggaacacctgatcagccaggacaacagaatctgccgggcggcgaagaaggtgatgggttcttttacgctaagctaatcaagaagtgatgagataacgggccacgactgatgaaaattatcatactgggcgcagggcaagttggcggaacactggcggaaaacctggtcggcgaaaacaacgacatcacggtggttgataccaacggcgaacggttacgcagtttgcaagataagttcgatctacgcgtagttcaggggcatggttcgcatccccgcgtgttgcgcgaagcgggcgctgacgatgcggatatgctggtcgctgtcaccagttcagatgaaactaatatggttgcctgccaggtagcctattcactcttcaacactccaaaccgtatcgcccgcattcgctccccggactatgttcgcgatgcggataaactctttcattctgaagcggttccgattgatcatctgatcgcgccggagcagttggttatcgataatatttatcgcctgatcgagtatccgggagcattacaggttgtaaactttgccgaagggaaagtcagtctggcagtagttaaagcctactatggcggtccactaataggtaacgcgctctcgacaatgcgagagcatatgccgcatatcgatacccgcgttgccgcaattttccgccatgacagaccaatccgtcctcagggctcgactatcgtggaagcaggggatgaagtcttctttattgcggcttcacagcatatccgtgcagtaatgagcgaattacagcgtctggaaaaaccctacaagcgcatcatgctggtgggcggcggcaatatcggcgccgggctggcaaggcgtctggaaaaagactatagcgttaaattgatcgaacgcgatcaacaacgcgccgcagaattggctgagaaactgcaaaacacgatcgtcttttttggcgacgcttccgatcaggaattgctggcggaggagcatattgatcaggtcgatctctttatcgcggtcactaacgatgatgaagccaatatcatgtccgcgatgttggctaagcggatgggcgccaagaaagtgatggtgttgatccaacgtcgcgcttatgtcgatcttgtgcagggtagcgttatagatattgcgatttctccgcagcaggccaccatctctgcattactgagccatgtgcgtaaagcggatatcgtcggcgtttcctcactacgtcgcggggttgccgaagccatcgaagccgtcgcgcacggcgatgaaagcacttcccgcgtggttggccgcgtcattgacgaaattaaactgccgccaggcaccattattggcgcggtggttcgcggtaatgatgtcatgatcgctaatgacaatttgcgcattgaacaaggcgatcacgtcattatgtttttgaccgataaaaagtttattaccgacgtcgaacgtctgttccagccaagtcctttcttcctctaatttaaggggcgctcattcagcgccctttttaattccctttatttatcaaggtttaatttatttcgctaaacagaagccgtaaatggaaaatgccttagcatttgttaaacttataacgtcagctgcatagggagaataaaaatgagttttattaaagaatttcgcgaattcgcgatgcgcgggaatgttgtggatttggcagtgggtgtcattattggcgcggcattcggtaagattgtttcttcactggttgccgatatcattatgccgccgttgggattgttaatcggcgggatcgactttaaacaatttgcttttacgttacgcgaagcgcagggagatattccggcggtcgtcatgcattacggcgtgtttatccagaacgtatttgattttgtgattgtggcctttgctatctttgttgccattaagcttatcaacagactcaaccgtaaaaaagcagaagagccggcagctccgccagcgccttctaaagaggaagtgttattgggcgaaatccgcgatctgctgaaagaacaaaataaccgttcttaataagcagaaggccagtggtaaaaaagtgattcactttcttgccactggcctcccagttccctcgattaccgtgtttacctttacgcagataacttcctttgcctttcttatttttttcaacgcgttgcctgaaaaggggatcgtgcagtaatgcctcgatggcattgtcctttatctgccctttcttatgttgataacgactcataatgtctcccgattgtataaattaacggcgcgagtgtagccccgccggttcaataaatcaacatcccgatttcgctccactggccccctgttccagggcttccagaatggaacaatagacgctactgtgggccgttccgcaacaagcatcattaagcctttgtaacgaacgctgcatcgtttgcagttccgcaatcctggcttcaacctcctgcaatcgctcttgcacaatactttttgactcctgacaggtatggtgctcaggatcaattcggatcgataaaagctcgcggatcgagtcgagcgtgaaacccaactgccgcgcataacgaataaacttgagacgctgcagatcgttttcggtatacagacgaaacccgccttcagtacgtacctcatgatccatcatctgttgcttttcatagtagcgaatggtatcaggcgttacgtctgccagctttgccagctcaccaatgcgatacatacaagctccgttaattatcgttgattttatgcagcagtttttctgcatactcaccgtgtaaaaagtcggtactcaacccagcctgccgaagttttagttcaagcagcgagagctggcgactaacctgatggtatcgagggtcatcttcccggatactgttgaggatatcaagtaactgaatagcatctctgcgctgctccagttcagggggaagacagcccgcattcttgagtaagcgataacccgcacgaagttccgccggcacatgagaatcatcatccagaataagcggctcgccacggccaggcaaattatcaaactcgcctttacgctgtgcctcgataatatgacgctctgcccactggtcaagtaaccacatacgtcgctccagggattgaacgaaaagaatacaattattgtagatatgtggggttcaggagggtataaaaaaacccgccgaagcgggtttttttacgttactacagattactctgcagcagcttctgttttctctgaacgatcaaccagctcgatgtatgccatcggcgcgttgtcgcctgcacggaagccacacttcagaatgcgagtgtaaccaccggcgcggctcgcgaaacgcgggcccagctcgttaaacagttttgccacgatctcgttatcacgagtacgggcgaatgccagacgacgattagcaacgctatcagtcttggcaagagtaatcagcggctcaactacgcgacgcagctctttcgctttaggcagggtcgtcttgatgatttcatgacgaaccagtgaacctgccatgttgcggaacatagcctggcgatggctgctgttgcggttcagttgacgaccactcttacgatggcgcatgaccttatccttctcagtaaaaccttaacctgtgatccggttactcgtcagcgatgcttgccggtggccagttttccaggcgcatacccagagacagtccacgggaagccagcacgtctttaatctcggtaagagattttttacccaagttaggcgtcttaagaagctcaacctcggtacgctgtaccagatcaccgatatagtggatagcttctgccttgaggcagttagcagagcggacagtcaattccagatcgtcaacagggcgcagcaggatcggatcgaattctggtttctcttctttcacttccggttgacgtacatcacgtaaatcaacgaaagcttccagttgttcagccaggatggttgccgcacgacgaatcgcctcttcaggatcgattgtgccgttggtttccatttcgatgaccagcttgtccaggtcggtacgctgttctacacgcgctgcttcaacattgtaggcaatacgctctacagggctgtagcaggcgtcgaccagcagacggccgattgggcgctcatcttcttccgaatgaattcgggtagaagccggcacataaccacgaccgcgctgaactttgatacgcatactaatagacgcgttttcatcggtcaggtggcagatcacgtgctgcggcttgacgatttcgacatccccatcatgggtgatatcggctgcagtcacagggccaatgccagatttattcaaggtaagaataacttcatctttaccctgaactctcaccgccagccctttcaggttgagcaggatttccaggatgtcttcctgaacgccttctttggtgctgtactcatgtagtacaccatcaatctcaacctcggtcaccgcgcaacccggcatcgatgagagcagaatacggcgcagtgcgttacccagagtatggccgaagccacgctctaaaggctcaagggtcaccttggcgtgcgtcgaactcacttgctcgatatctaccaggcgcggttttagaaactctgtcacagaaccctgcattgtgtcctctctttggtactaagctttacttggagtaaagctcgacgatcaggtgttcgttaatgtccgcagacagatcagaacgctcaggcttacgcttgtacgtaccttccatcttgccagcatcaacttccagccaggttggcttttcacgctgctcagccagctccagagcggctttcacgcgagactgcttcttcgctttctcacgaatgctaacaacgtcattcggactaacctgataagaagcgatgttaacaacacgaccgtttaccataattgctttatggctaaccagctgacgtgcttctgcacgagtggcgccgaagcccatacggtatacaacgttgtccagacgaccttccagcagagccaacaggttttcaccggtgttgcctttcagacgtgctgcttctttgtagtagttacggaactgacgctccagcacaccgtaaatgcggcgaactttttgcttttcacgcaactgcacaccatagtcagacagacgcggcttacgcgcaccgtgctggccaggagcttgttcaattttacacttggtatcgatcgcgcgaacgccagacttaaggaataagtcggtgccctcacgacggctcagcttgagcttaggacccaaatatcttgccattttctttctccaactaacctggaaaacgaagcgttatacgcgacgttttttcggcggacgacaaccgttatgagggatcggagtcacatcagtaatattagtgatgcggaaaccagcggcgttcagagcacgaatagtagattcgcggcctggacccggacctttaaccataacttccagattcttgataccgtattctttcacggcgtcagcgcaacgctctgctgcaacctgagctgcaaacggagtggatttgcgagaaccacggaaaccggaaccaccggctgttgcccaacccagcgcattaccctgacgatcggtaatagtcacgatggtgttgttgaaagaagcatggatatgagccacgccgtcagagacttgttttcttacacgtttacgtgcgcgaactggtgcctttgccattattcaatcaccccgattatttcttgatcggtttgcgcggacccttacgggtacgagcgttggtcttggtacgctgaccgcgaaccgggagaccacgacgatgacgcaaaccgcgatagcaaccaagatccatcaggcgcttgatgctcatgctgatttcacggcgcagatcaccttcaacgacaaatttggcaacttcgtcacgcagcgtgtcgatttgttcttcagacagctcactgatcttaacattttcagcgatacccgctgcagccaggatggctttagaacgggtcttgccgacaccgtagatcgaagttaacgcgatcacggcgtgtttctgatcaggaatgttaatgcctgctatacgggccactatgcactcctactatttaatatgtacgtaccatgctgaaaagcccgttttcaggatactcaaatggaaacgtacagacatacaaaagattggctggctaatctagccagctcaacccaactttgcaagaaaaatatgcgaaaaaatcagccttggcgctgtttatgcttcggctcggcactgcaaatcacacggatgacaccatcacgcttaacgattttgcagttacggcataatttcttgacggaagcacgaactttcatttttactctccgtaacttctcaggcgaccaattaacggccgtagcctttcaggttcgccttcttcaatgcagactcatactgactggacatcatcagagtttgcacttgagccataaagtccataatcacgacaacaacgataagcagtgaggtcccaccgaagtagaacggcactttcattgcatcacgcatgaactccgggatcaggcagataaaggtaatatacagcgcaccaaccagggtcaggcgggtcattactttatcgatatacttcgccgtttgctctcccggacgaattcctggtacaaatgcaccggacttcttcaggttatctgctgtttcacgcgggttgaaaaccaacgccgtgtagaagaaacagaagaagatgattgcagacgcatagagtaacacataaagcggttgcccaggctgcaaatacagcgaaattgttgtcagccagttccaaccagtaccgcccccgaaccatgacgcgatggtcgccgggaacagaataatactggaagcgaagattgccgggattacccccgccatattcactttcagcggtaaatgtgtgctctgtgcagcatagacacgacgaccttgctgacgtttggcgtagtttaccacaatacggcgttgaccacgttcaacgaatactacaaagaacgtcactgcaaatactaatactgcaaccaacagcaacacgaggaagtgcaggtcgccttgacgcgcttgctcgatagtatgggcaatggctggcgggagtcccgcaacgataccagcgaagatgatgattgagataccgttaccgataccgcgctcagtaatctgttcgccgagccacatcaggaacatggttcctgtaaccagactgacaacagcggtgaaatagaatgcaaagcctggattcatcaccaggccctgcataccaggcatattcggcaaaccggtagcaataccgatcgactggaatatcgccagcaccagagtaccgtaacgggtgtactggctgatcttacgacgaccagactccccttctttcttaatttctgccagcgttggatgaaccaccgtcaacagctggataatgatcgacgccgaaatatacggcatgatccccagggcaaagatagaagcacggctgagagcaccaccagagaacatgttaaacatttcaatgatggtgcctcgctgttgctcaagcagtttggcaagtacagcggcatcaataccagggatcggaataaaagagccaatacggaacacaatcagcgcgccgataacaaacagcagtctgcgtttcagctcacctaagccacctttggcactttgaaaatctaatcccggttgtttagccatctgctacttattcctcgattttaccgccagcagcttcgatagcagcacgagcgcctttagtaacacgcaggccacgaacagttaccggagtagtgacttcgccagccaggatcactttcgcgaactcgatctggataccgataatgtttgccgctttcagcgtgttcaggtctacaacgccgccttctactttcgccaggtcagacagacgaacttcggctgtaatcgctgctttgcgagaagtgaagccgaatttcggcagacgacggtacagaggcatctgaccaccctcgaaaccgcgacgtacgccaccgccagaacgagacttctgacctttgtgaccacgaccaccggttttaccgaggccagaaccgataccacgacccaggcgtttacccgcctttttggagccttcggccggagacagagtatttaaacgcatctcttactcctcaactttaaccatgaaggaaaccgcgttgaccataccacgaacagcaggagtatcctcgcgctctacggtgtgaccaatacgacgcagacccaggccaagcagcgttgccttgtgtttcggcagacgaccgattgcactgcgggtttgagtaattttaatagtctttgccatggtttatttccccagaatttcttcaacggatttaccacgcttggcagcgaccatttctggagaattcatattttccaggccatcaatagttgcacgaaccacgttgatcgggttggtggaaccgtatgctttagccagaacgttatgaaccccagcaacttccagaacggcgcgcattgcaccaccggcgatgataccggtaccttcggaagctggctgcatgaatacacgagaccccgtgtgaacacctttaaccgggtgctgcagggtgccgttgttcagcgcgacgttaatcatattgcgacgggctttttccatcgctttctggatcgctgctggaacttcacgcgctttaccgtaaccaaaacctacgcgaccgttaccatcgcctactacagtcagagctgtgaaggagaaaatacgaccacctttaacggttttagatacgcggtttaccgcgatcagcttttcctgcagttcgccagcttgtttttcgatgtgagccatcttacacctctaccttagaactgaaggccagcttcacgggcagcatctgccagtgcctggacacgaccatgatattggaacccggaacggtcaaaggacacatctttgatgcctttttccagagcgcgttcagcgacagctttacccacagctgcagccgcgtctttgttaccggtgtacttcagttgttcagcgatagctttttctacagtagaagcagctaccagaacttcagaaccgttcggtgcaattacctgtgcgtaaatatgacgcggggtacgatgtaccaccaggcgagttgcgcccagctctttgagcttgcggcgtgcgcgggtcgcacgacggatacgagcagatttcttatccatagtgttaccttacttcttcttagcctctttggtacgcacgacttcgtcggcgtaacgaacacccttgcctttgtaaggctcaggacgacggtaggcgcgcagatctgctgcaacctggccgatcacctgcttatcagcgcctttcagcacgatttcagtttgagtcggacattcagcagtgatacctgccggcagctgatggtcaaccgggtgagagaaacctaaagacaggtttactacattccctttaaccgctgcacgataacctacaccaaccagctgcagcttcttagtgaagccttcggtaacaccgataaccattgagttcagcagggcacgcgcggtaccagcctgtgcccaaccgtctgcgtaaccatcacgcggaccgaaggtcagtgcattatctgcatgtttaacttcaacagcatcgttgagagtacgagtcagctcgccgtttttacctttgatcgtaataacctgaccgttgattttgacatcaacgccggcaggaacaacgaccggtgctttagcaacacgagacattttttcctccgattaggctacgtagcagataatttcgccaccaagaccagcctggcgcgctgcacgatcagtcataacacctttagaggtagaaacaactgcgatacccagaccggccataactttcggcagctcatctttacgtttgtagatgcgcagacctgggcggctgacacgctgaatgctttctacaacagctttaccctggaaatacttaagagtcagttccagttccggcttggtgtcgccttcaactttaaaatcttcaataaaaccttcttccttcagcacgttggcaattgccactttcagcttggaggaaggcatggtgaccgcagctttgttcgcggcctgaccgttacggatacgggtcagcatatccgcgatcggatcttgcatgctcatctgtctttactcccgtgattcaattggtgacaattaccagctagcctttttcagacccggaatttcaccgcgcatagcggcttcacggaccttaatacggctcaacccgaacttccgcaggaaagcgtgcggacgaccagtttgacggcagcggttacgctgacgtgacgggctggaatcacgcggcagagtctgcagcttaagaaccgcattccaacgatcttcgtcggttgcgttcacatcagagatgatcgctttcagttcagcgcgtttcgcgaagtatttatcagctaaagctacgcgttttacttcgcgtgctttcattgattgcttagccatttagtaaccctaccttacttgcggaacgggaagtcaaaggcagccagcagagcacggccttcttcgtcagatttcgcagtagtggtaatggtaatatccaaaccacgaacgcggtcgactttatcgtagtcgatttctgggaagatgatctgctcacggacacccatgctgtagttaccacgaccgtcgaatgacttagcggacaagccacggaagtcacggatacgaggaacagcaatagtgatcaggcgctcaaagaactcccacatgcgttcgccacgcagagttactttacagccgatcggatagccctgacggattttgaagcctgcaacagatttgcgtgctttggtgatcaacggtttttgaccggagattgctgtcaggtctgctgctgcgttatccagcagtttcttgtcagcgatcgcttcaccaacacccatgttcagggtgatcttctcgacccgagggacttgcatgacagaattgtagttaaactcagtcatgagtttgttaactacttcgtctttgtagtaatcatgcagtttcgccatcgtactactccaaattacttgatagtttcgctgttagacttgaagaaacggacttttttgccgtcttcgaatctaaagcctacacggtcagccttgccggttgccgcattgaagattgcaacgttagaaacctgaattgcagcttctttttcaacgatgccgcccggttggttcagagccggaaccggcttctggtgtttcttaaccaggttgataccttcaacaatgaccttgccggaagacaggacattcttaactttaccgcgtttacctttatctttaccggttaacacgataacttcgtcatcacgacggattttcgctgccatgattcgctccttagagtacttctggtgccagagagataattttcatgaacttctcgttacgaagttcacgagttaccggcccaaaaatacgcgtaccgataggctgctcgctgttattgtttaaaataacgcatgcattaccatcgaagcgaatgacagaaccgtccgggcgacgaacacccttcttggtgcgcaccactaccgccttcagcacatcaccttttttgaccttaccacgcggaatcgcttctttgatggtgatcttaatgatgtcgcctacgcctgcgtagcgacggtgcgagccacccagaaccttgatacacattacgcgacgtgcaccggagttgtcggcgacgttcagcatagtctgttcttggatcattttagtgctccgctaatgtcaactactactgagacccgaaaatcaggtcgttaaaaaaaccccatatcgagggcgcggcattataacaccgcaaatcagatatgggtagaaaaaataaacggcccatcgctgagccgtttattcgttgagaatgcgtactgtattacagaaccgctttctctacaacgcgaaccagagtccaggatttggtcttggacagcggacggcattcgcggatttcaaccacgtcgccgataccgcattcgttgttctcgtcatgtacgtgcattttggtcgtacgcttgatgaatttaccgtagatcgggtgtttcacaaaacgttcgatagcaacaacaatggatttctccattttgtcgctaaccacgcgaccttgcagagtacggattttatcggtcattacgcacccgccttctcagtcagtaaagtcttaacgcgtgcgacatcacgacgcacttgcttcaacaggtgagactgttgcagctggccacttgcagcctgcatacgcaggttgaactgctcacgcagcaggttcagtagctcggtgttcagctcttcaacgctcttctcacgcagctcttttgctttcattacatcaccgtcttagttacaaaggtggttttaatcggcagtttcgctgctgccagcttgaatgcttcacgggccagctcttccggtacgccgtccatttcatacaggactttacccggctgaatcaaggcaacccaatactccacgttacctttacctttacccatacgcactgccagcggcttttcagtgatcggtttgtccgggaatacacggatccagatcttaccttgacgcttaactgcacgggtcatagcacgacgtgctgcttcgatctgacgggcagtcagacgaccacggccaacagctttcaggccgaagctgccgaagctaacatccgcgcctgcagccagaccacggttgcggcctttgtgcattttacggaattttgtacgctttggttgtaacatcagcgacgctccttatttacggcctttacgctgctgctttttcggttgagcagccggtttttccggttgttcaacagcagccataccacccaggatctcgcctttgaagatccacactttaacgccgattacaccataagtggtgtgcgcttcagaggtgttgtagtcgatgtcagcacgcagagtgtgcagcggtacgcgaccttcgcggtaccattcggtacgtgcgatttccgcgccgcccagacggccgctaacttcaactttgatacctttagcgcccagacgcatggcgttctgtacagcacgcttcatcgcacgacggaacataacgcgacgttccagctgagaagtgatgctgtcagcaaccagtttagcgtccagttcaggtttacgaacttcggcgatgttgatctgtgcaggaacgccagcgatatccgctacgaccttacgcagtttttctacgtcttcaccttttttaccgataacgatacccgggcgagcggtgtgaatagtcacacggatgctcttagccggacgctcgataacgatacgagatacagacgctttagccagttccttcgtcaggtactgacgtactttaaaatcgctgtccaggttgtcagcgaattctttggtgttcgcaaaccaggtagagttccatggttttacaatacccaggcgaataccattaggatgtactttctgacccattgctagtctccagagtctcagcgatcggacacaaccacagtgatgtggctggtgcgcttcaggatgcgatctgcacgaccttttgcacgcggcataatgcgcttcatgctcgggccttcgtctacgaaaattttcgtaactttcagatcgtcaatgtcagcgccatcgttgtgttcagcgttagcaatggcagattccagaactttcttgaccagtacagccgctttcttgttggtgtaggtcagaatatccagagcctgcgacactttcttaccgcgaatcaggtcagcaacaaggcgaaccttctgagcagaagaacgagcatggcgatgtttagcgatagtttccatctcttcctcctaccttatttcttcttcgcttttttatcagcagcgtggccgcgataagtacgagtcggtgcgaattcacccagtttgtgaccgaccatttcgtcggaaacaaataccggaacgtgctgacgaccattatggacagcgatggtcaaaccgatcatgttaggaaagatcgttgaacgacgggaccaagtgcgcaggggcttcttgtctccgctttccaccgctttctctaccttcttcagcaagtgcaggtcaataaaaggacctttcttgagagaacgtggcatggcttatcctctaaaattatttgctacggcgacgtacgatgaatttatcagtacgcttgttgctgcgggtcttcttacctttggtctgaacgccccacggagttaccgggtgcttaccaaagttacgaccttcaccaccaccatgtgggtggtctactgggttcatcgcagtaccgcgaacggtaggacgaacgccacgccagcgtgcagcacctgctttacccagaacgcgcagcatatgctcagcattgccaacttcgcccagggttgcacggcagtctgcttcgactttacgcatttcaccagaacgcagacgcagggtgacataagcgccatcgcgagcaacgatctgaacgtaagtaccagcggaacgtgccagctgaccgcctttacctggtttcatttctacgttatgaacggtagaaccaaccgggatattgcgcatcggcagggtgttgcctgctttgattgcagcatcaacgccagactgaatctggtcgccagctttcaggcctttcggggccaggatgtaacggcgttcgccgtctttgtacagaaccagcgcgatgttcgcggaacggttcggatcgtactcaagacgttcaacaactgccgggataccgtctttgttgcgtttgaagtcaacaatacgataagcctgtttgtgaccaccaccgatatgacgagtggtgatacggccattgttgttacgaccaccggatttgctgtttttttcaaccagcggagcaaaaggtttgcccttgtgcagctctgggttgaccactttaacgacgtggcgacgacccggagatgtcggtttacatttaacaactgccattgtattactcctccgacttactcagcgccgccgacgaagtccagattctggccttctttcagggtgacgtaagcttttttccagtcgctacgacgaccgatacgctgtccgtgacgtttaactttccctttaacgaccagggtgttaacgacttcgacttcgacttcaaacagtttctgcacagcagctttgatttctgctttggtcgcgtctttagcaactttgagaacgatggtgttggttttttccatcgcagtagacgctttttcagaaacgtgcggtgcgcgcagcaccttcagcagacgttcttcacgaatcatgccagcatctcctcaacttgcttaacagcatcagcagtcattacgactttgtcgaaggcgatcaggctaaccgggtcgataccagtcgcatcgcgtacgtcaaccttgtgcaggttacgtgcggccaggaacaggttctcgtccagctcaccggtgatgatcagcacatcttccagagccatgtctttcagtttctgtgccagcagcttagttttcggcgcttctacagaaaacttctcgacaacgatcagacgatcctgacgtaccagttcggacaggatgcttttcagcgcgccgcggtacatcttcttgttaactttttgactgtggtcctgcggacgagcagcgaaggtcacgccaccggaacgccagatcgggctcttgatagaacctgaacgcgcacggccagtgcctttctggcgccacggttttttaccggaaccagttacttcagcacgagtcttctgagcacgagtaccctgacgagcaccagctgcataagcaacaacaacctggtgaaccagcgcttcgttgaaatcacgaccgaaggtagtttcggaaacagtcagcgcgctctgcgcgtctttcaatactaattccattgctatccccttacgccttcacagctggtttaacgatcaggtcgcaaccggttgcacccggaacaccacccttaaccagcagcaggttgcgctcagcgtcaacgcgtactacgtcaaggctctgaacggttacgcgctcattacccatctgacctgccattttcttgcctttgaacactttgcccggagtctggttctgaccgatagaacccggaacgcggtgagacaaggagttaccgtgagtagcgtcctgggtacggaagttccagcgcttaacggtaccagcgaaacctttacctttagaggtaccggttacgtcaacttttttaacgtcagcaaacagttcaacgctgatgctctgacctacggtgtattcttcgccttcagccagacggaattcccacagaccacggccagcttctacgccagctttagcaaagtgacccgcttccggcttggtgacacggttagcttttttagcacccgtagtaacctgaacagcgcggtagccatcgttagccaggtctttaacctgagtaacacggtttgcttcaacttcgattacggttactgggatagagacgccatcttcagtgaagatgcgggtcatacccacttttttaccgactaaaccaatcattgtatcaacctctcaatcgctcgatgacctgattaacccaggctgatctgcacgtctacaccggcagccaggtccagacgcatcagagcatcaacggttttctcggttggctcaacgatgtcaaccagacgcttgtgagtgcgaatttcgtactgatcgcgcgcatctttgttaacgtgcggagagatcagaacggtaaagcgctctttgcgggtcggcagcgggatcggaccgcgaacctgcgcaccagtgcgcttggcagtctcgacgatttccgcggttgattgatcgatcagacgatgatcaaacgctttcaggcggatacggattctttggttctgcatgagaccagagctccaattattttataaacgaaaatgattactcctcacacccattacgattgatgggagagtgtaaccgttcttacgtagctccccgattgggagcattgttaaatagccaaatcggctattcgaggttcaaatcgaacctgccgtcaattacgacaagcccgtgcattatacgtaaatctcagcctgacgcaagtgtcggatagaaattaagcgctttattcttatgcgagcacgattccagatggtacgcatgggatggcgacgcgcatcttttctttggaaggcatcaggcaaacctggcaatacgtcgttgtcgctgtcgcataaatctataaaggtgagcgcaagccttgacgaggatttgcttatgtttgttgccctcccctttctcattttttatgcgtcgttctctttattacttggcatatacgacgcgcgtaccggtctgctgcctgaccggtttacttgtccattgctgtggggtggtctgctttatcaccagatttgcctgccggagcgtttaccggatgcgctttggggcgctatcgccggctatggcggattcgcgttaatttactggggctatcgcctgcgttatcagaaagaggggcttggatatggcgacgtcaagtacctcgctgccttaggggcgtggcattgttgggaaacactgccgttactggttttccttgccgctatgttggcctgtggcgggtttggcgtcgcgctactggtgagaggtaaatcggcattaataaacccgctaccttttgggccatggctggcggtggcgggtttcataacaggttggaaagttttctttccagacggttaatcggtaaccttaatttgtgattgcagataattttgcataccaagtttggcaatcaaatccaactcagtttccagccagtcgatgtggccttcctcgtcggcaagaatttcaatcatcatatcccggctgacataatcatgaacgctatcggcataggctattgcctcacgtagatcttttgcgccttccagttcgagccggagatccgatcgtagcatctcttcgacatcttcaccgatgcccagcttgcccagatcctgtaggttcggtatgccttccagaaataaaatacgctcaatatacttatcagcgtgtttcatctcatcaatggattcatggtactcaacatcattaagccgggtcagcccccagtttttgaacatacgggcatgaagaaaatactgattaattgcgacaagctcatttcccaatagtttattgagataatttatgattttaacatcacctttcattttatagtccctccgcttccactctctagagcgtagatggggctacagggatgtcaaaaaaaagagtgtgactcaggcgatctctttaaattccggcatttgcgttaactcatcctgcatcacttctcgcgcggcgcgaatacacttaccacattgatttcccacaggaataaatttacgcaactgttgaaatgactgtggatgaaattgtcgtacagcctggcggatttttttatcgcttataccattacacaaacaaacgtacatgatcgctcccgttcaatttccgcacaaagtgtaaatgagaatggttatgattacaatagcacaaagcgatttacgccacgggagaagcgttaaaaagggtgaataaatataacagcggctaaatagcaggcaacaaaaagggcgccgaagcgccctcttcaattcaaaactaattaacgagtaattagcccagaactttagcaacaacgcccgcgccaacggtacggccgccttcacggattgcgaaacgcagaccgtcgtccatcgcgatcgggtggatcagggtaacaaccattttgatgttgtcgcccggcattaccatctctacgccttccggcagttcgatggtaccagtcacgtcagtagtacggaagtagaactgcggacggtagcctttgaagaacggagtatgacggccgccttcatctttggacagaatgtacacttcagattcgaacttggtgtgcggcttgatggtgcccggcttagccagtacctgaccacgttcgatttcttcacgtttgataccacgcagcagaacacctacgttctcaccggcacggccttcgtccagcagtttgcggaacatttcaacgccagtacaggtagacttctgagtctctttgataccaacgatttcaacttcttcgcccactttgatgataccgcgctctacacgaccggtaacaacggtaccacgaccggagatggagaatacgtcttcgatcggcagcaggaacggcttgtcaatcgcacgctctggttccggaatataagaatccaggaagccagccagttcgatgattttcgcttcccactctgcgtcgccttccagcgctttcagagcagaaccacgaacgatcggagtgtcgtcgcccgggaagtcgtactgagacagcagttcgcgaacttccatctcaaccagttccagcagctcttcgtcatcaaccatgtcgcatttgttcaggaacacgatgatgtacggaacgcctacctgacgacccagcaggatgtgctcacgggtctgcggcatcgggccgtcagtcgcagcaacaaccaggatcgcgccgtccatctgagcagcaccggtgatcatgtttttaacatagtcagcgtgccccgggcagtctacgtgtgcgtagtggcgggtcggggtatcgtattcaacgtgagaagtgttgatggtgataccacgcgctttttcttccggcgcgttatcgatctggtcgaatgcgcgagcggcaccgccgtaggttttagccagtacggtagtaatggcagcggtcagcgttgttttaccatggtcaacgtggccgatagtaccgacgttaacgtgcggttttgtacgttcaaatttttctttagacacggctatattccttactatagcgctctccccttcaggagagagcacgggattttggtttttaaccctgcggcttatttaccacgggcttcgattacggcctgagcaacgttgttcggcgcatcatcatacttcaggaattccatagtgtacgatgcgcgacctttggtcagagaacgcagctgagttgcatatccgaacatttcagacagcggtacttcagcgtggatcttaacgcctgtaacttcagattcctgacctttgagcataccacgacggcggctaaggtcgccgataacgtcaccggtattctcttcaggtgtttctacttcaaccttcatgatcggctcaagcagaactggttttgctttcttaaagccttctttaaaggcgatagacgcagccagtttaaacgccagctcagaggagtcaacgtcatggtaagaaccgaagtgcagacgcacaccgagatcaactaccggataaccagccagcgggccagatttcagctgctcctggatgcctttatcaacggccgggatgtattcgccaggaattacaccacctttgatgtcgttgatgaactcgtaacctttcgggttagagcccgcctccagcgggtacatgtcgataacaacatgaccatactgaccgcgaccaccagactgtttcgcgtgtttaccttcgatgtcggtaactttcgcgcgaatcgcttcgcggtaagcaacctgaggtttacccacgttagcttcaacgttgaattcacgcttcatacggtcaacgatgatatccaggtgaagttcacccataccagcgatgatggtctggttagattcttcatcagtccatacgcggaatgacgggtcttctttcgccagacggcccagagccagacccattttttcctggtcagctttggttttcggttctaccgcgatggagattaccggctcagggaattccatacgttccagaatgatcgggttttccggatcacacagggtgtcaccggtagtcacgtctttcaggccgatagcagccgcgatgtcgcccgcgcgaacttctttgatctcttcacgtttgttggcgtgcatctgaacgatacgaccgaaacgctcacgtgcggttttcacggagttcagtacggtatcaccagagttaaccacaccggagtacacacggaagaaggtcaggttacccacaaacgggtcggtagcgattttgaacgccagcgcagagaacggctcgtcgtcgcttgcgtgacgctcagccggagtatctttaccgtcgtccagaataccgttgatcgcaggtacgtctaccggggatggcaggtaatcaattaccgcatccagcatcgcctgaacacctttgttcttgaatgcagaaccacaggttaccaggatgatttcgttgttcagaacgcgctgacgcagagcttgtttgatctcttcttcagtcagttcttcaccacccaggtatttttccatcagctcttcagaagcttctgcggcggactcgatcaggttctggtgccattcgttagccaggtcctgcatgtcagccgggatatcttcgtattcgaaggtaacgccctggtcggcatcgttccagttgatggctttcattttcaccaggtcaacaacgccggtgaaaccttcttcagcaccaattgccagctgcagcggaaccgggttcgcgcccagacgggttttgatctgaccaacaactttcaggaagttcgcgcccatgcggtccattttgttaacgaacgcaatacgcggaactttgtatttgtttgcctgacgccatacggtttcagactgcggctgaacaccaccaactgcgcagtaaaccattaccgcaccatcgagaacacgcatggaacgttctacttcgatagtgaagtcaacgtgccccggggtgtcgatgatgttgatgcgatgcggttcatactgcttagccataccagaccagaatgcagtagtcgctgcggaggtgatagtaataccacgctcctgctcctgctccatccagtccatggtagctgcgccgtcatgaacttcaccgattttgtggtttacaccggtgtagaacagaatacgttcggtagtagtggttttaccggcgtcgatgtgcgcactgataccgatattacggtagcgtgcgatgggtgttgtacgagccatttgattcctcgttgatatctttaggcgttcagttaagttatccaaaacgggcgacttacctgaagcgcccgcctggtgactatgactccgaagggattaccaacggtagtgtgcgaacgccttgttggcttctgccatacggtgaacgtcttcacgtttcttaactgcagtacctttgttgtctgcagcatcagaaagttcgttcgccaggcgcagagccatggatttatcaccgcgtttacgagcagcttctacgatccaacgcattgccagagcattacgacggaccggacggacttcaactggtacctgataagtagaaccacctacacggcgggatttaacttctacagtcgggcgaacgttttcgagagcgacttcgaaagcttccagttcagatttaccagaacgctgagccagggtctccagcgcgctgtatacgattgattctgcagtagattttttaccatctaccatcaggatattgacaaatttagccagcagttctgatccgaacttcggatccggcagaattttacgctgaccaatgacgcgacgacgtggcatggaaatactccgttgttaattcaggattgtccaaaactctacgagtttagtttgacattaatttaaaacgtttggccttacttaacggagaaccattaagccttaggacgcttcacgccgtacttagaacgagcttgcttacggtctttaacgccggagcagtcaagcgcgccacgaacggtgtggtaacgaacacccgggaggtctttaacacgaccgccacggatcaggatcacggagtgctcctgcaggttgtgaccttcaccaccgatgtaggaagtcacttcaaaaccgttagtcagacgaacacggcaaactttacgcagtgcggagttcggttttttaggagtggtagtatatacacgagtacatacgccacgtttttgcgggcatgcttccagcgcaggcacgttgcttttcgcaactttgcgagcacgtggtttgcgtaccagctggttaactgttgccattaaatagctcctggttttagcttttgcttcgtaaacacgtaataaaacgccctcacacaatatgaggacgccgaattttagggcggtgtcgaaaaggtgtcaagaaatatacaacgatcccgccatcaccaggccatctggttggcatacttaaccgtgagtctgacaaactcagtatagtcaaccctgacgacactgtctgaaatttgaccacccaggccgcgggcgtcaatgtcttctttcaaggcatagaccgttatgggggcatcgcgcagactttcaaggaagcggttaccttcaatcgcgacggtaacgccatcctggagcagcaaaagcgcatcgccctcttttagcaggcgcagcaaagcgggaaaatcaacgctcgaagcgcaatgaggtaaggtatgcagcataaacgcctcagaatctcaggatgacatcatagttgccaagctcgcggcgtaacgccacgggttccagcggcgtggcgtctaccacaaaattaatgttctccagaccacgctcgcgcagcgatgccgcgcagatccagcattgatcaatatcgtacaaatcaaagagcttgaaagtagcaatatagtcacgcgccagtacagcgtctggtttttgtccgggtaataactgaaagacgccgtcgctgataaaaaagacgcccagcgcttccgttagcgctgacgtcgccagcagcgcatccagcccttcacgacctgaggcgctgccgtgcggcgcggtggaaaagacaaatgcaatacgtttcattaaaactgcaccacccgatcgcaggtgagagatgcctccgccagcgcgcccaggccgcttagcgtaaagcccggctgaagattggcggacggcaacgccaatctgccggcttcagtttcatcaataataccgcgacgaagcgccgccgcgacacagatgttcagcgctacgccatgctgcgtattcaatttctgccaggcgcgtaccagatcatattcatcgctcgccggcgaggtcaggagattggcgttatagacaccttcccgatagaaaaagacgctggctaactcatgcccctcattgagcagcgcgtgggcgaactgcaatgcgctgctggcctgctgggtgccatatgccggcccggtgaccataatggcataacgcattatttatcctgcccctgaaagtcgccgcttttgaactggcgaatatagaggtaaaccgtgtgttttgagatattcagacgatcggctacctggttaatggcgtctttaatatcgaaaatgcctttttcgtacaggttaaggacgatctgacgatttttcgcattgttagaaacattacgatcggcattcacttcttcgatcgtgaactccagcgtctgggtgactaaatcttcgactgaggaggcaaaattaaccgctgagccgacttccggcgtttccggcggaataaaggtattcataatctgtgaaaatggcacatcgagattcatgttgatgcacagtagaccaatgacgcgctgctcgcggttgcgaatggcaatcgtcaacgacttcatcaagacaccgcttttcgcgcgcgtgaaatagcatttcgacacgctactgtccgcccctgtcatgtcgtgcaacatacgcaacgccaggtcggtaatcggcgagccaattttacggcccgtatgttcgccattggcaatacgaatggctgaacattttagatcctgcaaagagtgcaatacgatttcacaatgggaacctataagcatcgctaacccgtccactaccgcttcgtaggatttcagaatatcgaagtcggtttgctcgaagggacgctgatccagcaaatcaagttcactggtttcgttggttaaaagcgacctggacatgaaaaaaaacactccttttcaggagcctgtcgttatgttttcagggcaggctcattatttacgcggatgattaaattaatacagtgagggttcatctttccagtactaatttgctcgtctatttcagactacgtgtgcgttggcggtcattcagcctacggtctcgcccttaacgaccagcgcaagcgccgttatccgcaaatcaaattatggtgagtaatatatccggcctgaataaaaaaaaccgccgctattacaagcggcggctctcagtttttattttttagcagcatctgcggctttagcgtcagccgcatcggcaggtttagcatccgctttcggcgctggtttgatatccagcagctctacgtcgaataccagggttgagtttgccgggatccccggaacgcccgttttaccgtaggccagctcaggtgggataaccagcttgatcttgccgcctttcttaatatttttcagaccttcagtccagccagggataacgccgtccagacggaaggagagcggttcgccgcgcgtgtaagagttatcaaactctttaccgtcgatcagagtacctttgtagttcaccacaacggtatcgctatctttcggcgcctcgcctgtgccttctttctctactttgtaaagcaggccggtagaggaggttttcacacctttctctttagcaaaagcgtcgcggaacgttttaccttttgcttcgttatcggcagcgtctttttccatcttcgcctgagcagcgctcttcacgcgtgcttcaaacgtctgcagcgtttgctcaatttcctgatcggacagtttgctcttatcggcaaaggcatcctgaacgccggcaatcaactgatctttatccagtttgatgcctaacttttcctgctctttaagcgaattttccatgtaacgacccagcgaggcgcccagcgcataagccgctttttgatcgtcgtttttaaatgctgctttgctatcagcggtagctgccggtttcgccgcatcagcagcaaaagtgatcggtgcgtgcatagcaacggccatcgtagttgccagcagcgtggctttaaacagtgatttcatccatatctccagggccggggcatctcgccccatgttaacttacgtaagaagcgtactataaatcgttgcagaacaaatcaacatacgaacacgccctattatcacttcttttcagactctttttgtttaaattagtttcgtagtgcgcgtaatggttgctgtgaaagccggtaaagttaagtagaatccgccgacggagacaacataaagaggtacatcatgcaggatatcacgatggaagctcgtctggctgaactggaaagccgtctggcgttccaggagattaccatagaagaactaaacctgacggtaaccgcacatgaaatggagatggcgaagctgcgcgatcatctgcgtttgctcacggaaaagttaaaagccagtcagccgtcaaatatcgcctctcaggcagaagaaacgccgccgccgcattattgagacgaaaaaagcggggttaacccgctttttttgtgcccgatgatttatcgaaccaatgataataccctaaggatttcgagtcacagcaaggctgcaagcttgaaaattccccgggagcatagataactatgtgaccggggtttgaaagcgtagccaacaccgcggtggcttgaaagacgacggggattaatggcagccgcagccgcctttaccaccaccgccgcagcagccttcgccgccgtgctcgtgaccatggtcatgaccatgaccgccacagcagccgtcttcaccgtgatcgtggtggtgatcgtgcgcgccatgaacatgaccgtgagccagttcttcttcagtcgcttcacgaatcgcaacaacttctacgttaaatttcagattctggcccgccagcatgtggttaccatcaaccacaacgtgatcgtcttccacttcggtaatctctaccggtaccgggccctggtcggtttccgccaggaaacgcatccctacctgcagttcatcaacgcccataaagacgtctttaggcacacgctgcaccagattttcgtcatactggccgtaagcgtcgttcgcgccaacagcgacatcaaatttgtcgccaacttcatggccttccagcgcggtttccagaccagagatcagggagccgtgaccgtgcaggtaatccagcggcgcactcaccggagactcatcaaccaacacaccgtcttctgtacgtacctgataggccaggctgaccaccaggtcttttgctactttcatgatatctcctgagcatgggaagaatagtggcgcagattgtagcggaattctgcagccgtgtaccccttagcttaaaaaaacctgcggcatatcgctagtccggatgaaaaatcccgatcacttgctcttctttgcgaacatgctcgcggacgtctttatccgcttcccgcatttgatgcccgcacttaacgcattcaacaatatcgacattattttcacgccacatcgccattgtatcctgcgcctgacaggccggacatttcgcgcctgcaataaaacgtttacggattgccattgttttacccctactcaaattcatcccagccatccaactggcgccgttcctgttgcatttcccgctgaaaaatctcctccagttcgcgtcgggcctctctggcgcgcgaaatctgtaccatgtcgctatgctccgggatcagttcccgcaacattcgcatatccagccgacgaaaatgcaactgcgcgcgttgcgcctgatgcggatgcatacctaacgacaccagagttttacgtcccagttccagcgcgctggaaaacgtttcacgggaaaactgcgtgacgccagcctgtaataactcatgggcctccacacgtccacgcgctcgcgcaagaatatgcagatgaggaaaatgctgctgacacagcgccaccagcttcatcgtgtcttccggttcattacacgtgatgactatcgactccgccgcttccgcgcccgcagaacgcagcagctcgacttgtgtagcgtcgccgtaatacactttataaccatatttgcgcatcagattaacggcgccgatatcgcgttccagcacggtgatacgcatcttattcgccatcaataagcgagcgatcacctgaccaaaacggccaaagccgacgacaatcacctggggcttatcatcctcaacccacggcttttcatcattctcttccgggccattaaggcggcgcgataaccacttatcaatccctttcatcagtagcggcgtggtcatcattgataatgtgacagtcaccaataataacgccatctgatcgccctgaaacaggcgctgagaagaggcggtagaaaagagcacaaaagcgaactcgcccccctgactcagcacgctggcaaactgcatccgttcagaacttcttattccatatagccgcgccagcagatacagcgtcaacatttttatgacgaccagaataacaacgctcgccgccacccacagtaaatgggtataaagtacgccgagatttagcgacataccgacggagataaagaacagcccaagcagtaaacctttaaagggatcgatagcattttccagctcatgccggtattcgctctctgccagtaaaacgccggcaatgaaggttcccagggccatcgacagtcccagcgcatccataaataaggcggcgctcaacaccagcaacagcgtcgcggcagtgaagacctcccgcacgccagacgcagcaataaaacgaaataccgggcgcagcaggtaacgaccgccaatcagcattaccgcgaaagccagtaccttcattgccactttaaaccagtcgaaatgctcgtcggccgatcccgccaataaaggcaccaacgccagtgcggggatcaccgctaaatcctgaaacagtaagacggaaaaccctaactgcccggactcgctacgattcatgcctttctcgcgcatcagttgtagcgccatcgccgtcgaagacatcgccaggccaatcccgccgacgaccgccgcctgccataagaaatcagcaagcatcaataatcccgccagcaccgccgcgcttaacagcacctgagcagcgccgacgccgaagatagagcgccgcagttgccaaagccgggacggattgagttcgagaccaatgataaacatcagaaacacgacgcccagttcggaaaagtgcaggatctcgtcaacgtcgctgataaatcccagcccccacggaccgatggcgattcccgccagcaaataccctagcaccgcgccgatgcccagcctggcggctaacggcaccgccgctaccgctgcgaagaggaacaacactcccgcggtcaataaatcagcaccttccatcaatagcctcccgcgctcacaggattcgccagccactcgccataggctttcgcatgactggccagcgtctgcggcgactggcggcgcgcccagtacacaataatgggcggcatccagtgcatccggcacatggccgcggtcagttcaaaagggcggagtacatcgctcattggatagcggtttagcgcgtcataccggtaagcgctctccggctcgccggtcgtaatcacgctacgccagtactttcccaccagttggtttccccctggtccgctggcgaacccccgactcaaaacgcgatcaagccattctttcagtaaagccggacagctataggtgtaaaggggatgctgaaaaacaatgacgtcgtgctcacgtaacagggcttgttcatagggcgtgtcgataaaaaaatcaggatagcgcgcataaagatcgtgcacggttacgttattgtgctgtatggccggtttaagcagtacccggttagcaaccgagtcctgagattccggatgggcatacaacagcaagactttcgctggctgagacatcaatccccctcccggttgttttgggtcgatacatgccattcttcaggccgcttctacgttgacagcgtttgttcaactcaggaacgtactctatgtccgccgctggggattaatgagagatattcttgtccctcaccaaaggcggcctgaatgattttgtgtatcgttgttgttttgagctaccattgcgctccagcgcggcggtacgcccgaatattacattatcataatgataaattaacatagtctgaacatactgcgccttatgattgttttctcctcgttacaaattcgtcgcggcgtgcgcgtcctactggacaatgcctcggctaccattaatccaggccagaaagtcggcctggtgggtaaaaacggctgcggtaaatctaccctgctggcattgctaaaaaatgaaatcagcgccgatgccgggagttttaccctgcccggaacctggcaattagcgtgggtgaatcaggaaacacctgcgttgcctcagccagcgattgagtatgtcattgacggcgaccgtgaataccggcagctggaggcgcagcttaacgacgccaacgaacgtaacgacggacatgctatcgcctccatacatggcaagctggacgccatcgacgcatggaccgttcgttcgcgcgccgccagcctgctacacggtctcggcttctctaacgatcagctggaacgtccggtcagcgacttttccggcggctggcggatgcgccttaacctggcccaggcgctgatttgccgttccgatttactgctgctcgacgaaccgaccaaccacctcgatctggatgccgtcatctggctggaaaaatggctgaagagctatccgggcaccctgattctgatctcccacgatcgcgactttcttgacccgatagtggataaaattatccatatcgaacaacagactctgttcgagtacaccggcaactacagcgcgtttgaagttcagcgcgccacgcgcctggcgcaacagcaggcgatgtatgagagtcagcaggagcgtgtggcgcatctgcaaagctacatcgaccgtttccgcgctaaagcgaccaaggccaagcaggcgcaaagccgtatcaagatgctggagcgtatggagctgattgcgccggctcatgtcgacaacccgttccatttcagcttccgcgcgccggaaagcctgccgaacccgctgctgaagatggaaaaagtcagcgcaggttatggcgatcgcatcattctggaatccatcaagctgaacctggtgcccggctcgcgtatcggcctgctgggtcgcaacggcgcggggaaatcgacgctgatcaagctgctggcgggcgaactggaaccgttgcacggtgaaatcggcctcgccaaaggcattaagctcggctacttcgcccagcaccaactggagttcctgcgcgccgatgaatccccgctgcaacatatggcgcgtctggcgccgcaggaactggagcagaagctgcgcgactatctcggcggcttcggtttccagggcgacaaagtaacggaagagacgcaacgtttctccggcggcgagaaagcgcgcctggtactggcgctgatcgtctggcagcgtccaaatctgctgttgctcgatgaaccgaccaaccacctggatctcgacatgcgtcaggcgctcaccgaagcgctgattgatttcgaaggcgcattggtcgtcgtgtcgcacgaccgccacctgattcgctccaccactgacgacctctatctggttcacgacaaaaaggtcgaaccgttcgacggagacctggaagattatcagcaatggctgagcgacgtgcagaaacaggaaaaccaggccgacaacgcgccgaaggaaaacaacgccaacagcgctcagtcacgcaaagatcagaagcgtcgcgaagccgagctacgcactctgacgcaaccgctgcgtaaagagattacccgtctggaaaaagagatggaaaagctcaacgcccaactggcgcaggcggaagagaagcttggcgacagcagcctgtatgacccaagccgtaaagcggagatgaccgagtgtctgcaactgcaggccagcgccaaatccgggctggaagcgtgtgaaatggcatggcttgaggcgcaggagcagcttgagcagatgatgcagaacgactaagagcctatcccattaggctattttattcgccattttagggccgggcagtgctcgaaatcctcacgtactatgtgtacgctccggtttctgcgcgctgtccggccccaaactggcttcaacaattacgcctacggggataggctctaacgcacggggcggacgatgaacctgtctatcaccgatgacattaccttccgcaagctcaccatcttaatgatgcttgtggagaagggcaacatcgcccgtaccgccgaggcgctaaacacgctggaagagaacgttcgtggtccgctgttcgtccataaaggcctcttaggtactcgccccggtataaagattaccgttgcggtcagcagcaccggaacagaagcctgcgttatgtgatttagcggcaaaggttgccgtgatttattttcgtcagcgcgtcgttcacgccaaataatgtaaacgtcacctcatcaacgccaagatttttcagacgcgcagtgtgttttttaatataagcctgcgccgtttcttcggattcaaacaagtaaataccgccagcttgctggtttttctcgctttctgtccagattttccagatgaagcccggctcctcattgatagactccgccagcccgaccagttgctgagtcatctcctcgccaaaagggccgctaaagttaaaatggatctgtaaaagtgtcttcgacatgccttctccttgagtcgcataactatcgtgttgccacactaccacgattaattcggctgatgcagaggttcacgcgatttctgtggggtattgcgcgcgccttgcatactgccctctctggtgaaatgaggcgcaattttatttcgccagacgaccaattgaacgtaaaatcacatattgactaatctgtgaaccttatgcgcggtatagtattgtttccaattatcaattgttctggtgctatggttgagatcacgtccacagaaatgaccccgcctgtcaataactcgcatgaatttattcccatgcgtggcattcgtaatcgccatttacaaactatgctgccgcgtttaatccgccgcaaagtgaagttcaacgcccactggcagcggctggagctaccggacggcgattttgtcgatctggcatggagcgaagatccgcaacaggcaaagtataaaccgcggctggtggtctttcacggtctggaaggcagcctgaacagcccctatgcccacgggctgattgaggcggcgcaaaagcgcggctggctaggcgtggtgatgcactttcgcggctgtagcggcgagcccaaccgtctgaatcgtatttaccactccggtgaaacggaggatggagcctggtttttacgctggctacagcgggagttcggcgccgttccgacagccgccgtgggctattcgctcggcggtaatatgctggcgtgcctgctggcgaaagaaggccgcgatattcccatcgaggcggcggtaattgtttctgcacctttcgttctcgaagcctgtagctaccacatggacaaagggttttcccgcgtctatcagcgttatttgcttaatctgttaaaagcgaatgcgtcacgcaagctggcggcgtaccccgggtcgctgccggtgaatctggcgcaactgaaatcaatgcgccgtattcgcgagtttgacgacctgatcaccgcgaaaattcacggctttgccgacgccatcgactactatcgtcagtgtagcgccatgccgttgcttaaccagattgctaaaccgacgctgattattcacgctaaagacgatccgtttatggatcatcatgtgatccctaaagcggaagatctgcccccgcaggtggagtatcagctgactgagcatggcggacacgtaggatttatcggcggtacgccgttgcgccctgaaatgtggctggaacgccgaattcctgactggctgacaacgtacctggaggcgtcatcatgatcattccctggcaggggctcgcccccgacacgctggacaacctgatcgaaagctttgtgttgcgcgaaggcaccgattatggtgaacatgaacgttcgcttgaacaaaaagtcgctgacgtaaaacgccaactgcaatccggcgaggccgtgctggtatggtctgaattacatgaaacggtcaatattatgccgaaaaagcagtttcgcgaataaaacgcctttgccgacaatacattattactaaagctcaatcatggagttgccatgtcagccaaacatccggtgatagcagtaacagggtcaagcggcgcggggaccaccaccaccagcctcgcgtttcgtaaaattttcgcgcagttaaatctgcacgccgccgaggtggaaggcgacagttttcatcgttacacccgcccggaaatggatatggcgatccgcaaagcgcgtgacgccgggcggcatatcagctatttcgggcctgaagccaatgacttcagcctactggaacatacctttattgagtacgggcagacgggtaaaggccagtcgcgtaaatatctgcatacctatgatgaagccgtaccgtggaatcaggttcccggcacgtttacgccctggcagccgctacccgaaccgaccgatgtgctgttttatgaaggactgcacggcggcgtcgtcaccccgcaacatgatgtcgcgcgtcatgttgatctgttggttggcgtggtgcctatcgtcaacctcgagtggattcagaaactgattcgcgacaccagcgagcgcggacactcccgtgaagcggtgatggattccgtggtgcgttccatggacgactacatcaattacattacgccgcaattctcgcgtacccatatcaacttccagcgcgtaccgaccgtcgacacgtccaatccgttcgccgcaaagggtattccctcgctggatgagagttttgtggtgatccatttccgcaatctggaagggatcgattttccctggctcctggcgatgctccagggctcgttcatttctcacattaatacattagtggtgccgggcggcaaaatggggctggcgatggagctgattatgttgccgctggtgcagcgattaatggaaggcaaaaaaatcgaataaccgcggtgaaatgcccgatggcgctacgcttatcgggcctacgagataaaaacgggtaggccggataaagccacgccgccatccggcatcacatgttacgccgcaatcacttcatacgaatgggtaatattgaccgctttttccagcattagcgccaccgagcaatatttttccgcggagagatcgacagcgcgcgcgacggcagcctctttcagatcgctgccggtaacgataaaatgcagattaatgtgcgtaaacaggcgcggcgcgtcttcccggcgctcggatgtcagcttcacttcgcagttggtgacattctgacggcccttttgcaggattgataccacatcaatagcgctacatccgccagccgccattaataccatctccatcggactcggcgctttgtcaccggagttgccatccattaaaatctggtggccggaggaggactctccgaggaacgtgagcccttcaacccactttacacgcgcttgcatatttcgtaactccaatgtttcaattttcctgaaagattacgcgcatacaacaaaagtcgcaatggaaggcgacctgggtcatgctgaagcgagacaccaggagacacacggcgaaagctatgctaaaacagacaagatgctacagtaatacattgacgtactgcatgtatgcagaggacatcacattacaggctacaatctattttcgtagcccccttcccaggtagcgggaagtatatttttgcaaccccagagacagtgccgttttctggctctggagacagcttataacagaggataaccgcgcatggtgcttggcaaaccgcaaacagacccgactcttgaatggttcttgtctcattgccacattcataagtacccgtcaaagagcacgctgattcaccagggtgaaaaagcagaaacgctgtactacatcgttaaaggctccgtggcagtgctgatcaaagatgaagaagggaaagaaatgatcctttcttatctgaatcagggtgattttattggtgaactgggcctgtttgaagaaggccaggaacgcagcgcctgggtacgtgcgaaaaccgcatgtgaggtcgctgaaatttcctacaaaaaatttcgccaattaatccaggtcaacccggatattctgatgcgcctctcttcccagatggctcgtcgcttacaagtcacctctgaaaaagtaggtaacctcgccttccttgacgtcaccgggcgtatcgctcagacgctgctgaatctggcgaaacagcccgatgccatgacgcacccggatgggatgcagatcaaaatcactcgtcaggaaatcggccagatcgtcggctgctcccgcgaaaccgttggtcgtattttgaaaatgctggaagatcaaaacctgatctccgcgcatggcaagaccatcgtcgtctacggcacccgttaattccgtcagaatggcgcgttttatcatgcgccatttttgtttgcatcgatgtggcgaagactgatttatcacccagagattaattacgcactacggcaaacgctggtgctgtgcctgcctgtggctgttggtttattaataggccagctacacctgggcttgcttttctctctcgttcccgcctgctgcaacattgcaggtctggataccccgcacaaacgcttttttaaacgcctgatcatcggcgcgtcgctgttcgccggatgcagtctggtaacgcaacttctgctggcggaatccatccccctgccgttgatcctgaccggcctcacgctggtgcttggcgtgacggcggaaattagcccgcttcacgcgcggctactgccagcatcgctgattgccgccatctttaccctgagccttgcgggatacatgcccgtctgggagccgctgctcatttatgcgctgggcacgctatggtacggcgtgtttaactggttttggttctggctatggcgcgaacagccgctgcgcgagtcattgagtttgttataccgtgaactggccgattattgcgaagcgaaatacagcctgctcacccaacatatcgatccggaaaaagcgctgcctcccctgctgatacgccagcaaaaagcggtcgatctcattacccagtgttaccaacagatgcatatgctttcggcgcacaacaataatgattacaagcgtctactacgggcttttcaggaagcgatggatttgcaggagcacatctccgtcagcttgcatcagccggaagaggtacagaaactggtagaacgcagccatgcggaagaggtgattcgctggaatgcgcaaacggtcgccgcccgtctgcgcgtgctggcggatgacattctttatcatcgtctgccgacgcgcttctccatggaaaaacagattggcgctctggagaagatcgccaatcagcatcctgaaaatccggtaggccagttctgctattggcacttcagtcgaatcgcccgtgtgctgcgtactcagcgaccgctgtacgcccgcgacctgatggccgataaacagcgtcgtttgccgctacttccggcgctgaaaaattatatgtctcttaaatcgccggcgctacgcaacgccggacgcatcagcgtgatgatgagcatcgccagtctgatgggcagtgcgttgcacctgcctaaaccgtactggatactcatgacggtgctgtttgtcacccaaaacggctatggcgcgacgcgcgtacgtattctgcaccgttcggtcggaacgctggtcggcctggtgattgccggcgtcacgctgcacttacatattcccgaaagcattacgctggcggtcatgctggtactaacgctggcaagttatctgattattcgtaaaaactacggctgggcgacggtcggctttacggtgacggcggtatacaccatccagttactgacgttaaacggagagcagtttattgtgccgaggctgatcgatacgctgattggctgtttaattgcctttggcggcatggtctggctgtggccgcaatggcaaagcgggctattacgtaaaaacgcccatgatgcgctggaagccgatcaagaagctatccgactgatcctcagtaacgatccgcaggccaccccgctcgcttatcaaagaatgcgggtcaaccaggcgcataacacgttattcaactcgttaaatcaggcaatgcaggaacccggattcaatacccactatctgtcggatatgaaactatgggtcacgcacagccagtttattgtcgagcatatcaacgctatgacgacgctggcgcgggaacacaccatgctgacgccggatctggcgcagcgctatctggaatcttgcgagattgcgattcagcgctgccagcagcgcctggagtacgacaggccaggcggctccggcgatgtcaatattctggagtcgccggacatgccgtcacatggcttattgagcactctggaacaacatttacagcgcatcatcggccatctgaacaccatgcacaccatttcgtcgatggcctggcgtcagcgtccgcatcacggtatctggctgagtaagcggctacgggatacaaaaggttaagaccgaccgccggatgcgctacgcttatccggcaatccgccatcaggccaccaccttccctaccgcctgcgcaaagcgctgcattccttcatggatatccgcctcttccaccaccagcgacggggcaaaacgcatcacgtcggctccggcattgagcaccatcacgccggcctccgcgcctgcgtacagaaaatcgcgcgcccgacctttgtacttcggcttcagttccgcgccaatcagcagccccatgccgcgaatatcgctgaaaatgtcaaattgctcgtcaatcgcctgcaaatgttgcacaaactgttgccgcttagtgtgaatgccttgtagtacctctggcgtattaataatatcgaatgccgcgccagccaccgcacaggccagcggattgccgccataggttgaaccatgcgaacctacatggaaggccgaggctatttcctgcgtggtcagcatggcgctcaccggaaaaccgccgcctaacgctttggcgctggtgaggatatccggcgtgacgccgtagtgcatataggcaaacaggtctccggtgcgccccatcccacactgcacttcatcaaacaccagcaacgcctgatgctcgtcacacaggtcgcgtaaccctttgaggaattccggtgtagccgcctgcacgccgccttcaccctgaatcggctcgaccaccaccgcgcaggtgtggtcatccattaccgctttcaccgcatgaagatcgttgaagggaacgtgaataatatcggcgggtttcggcccaaagccgtcggaatatttcggctgcccgcctacagagacggtaaacaaggaacggccatgaaaagcgttatggaaggcaatgattttcgttttgaacgggctatggcgcacgcaggcataatgacgcgccagtttaaaagcggtttcgttcgcttcggtgccggaattcataaacagcacgcgctcggcaaacgtggcgtcgatcagtttacgtcccagacgcaacgctggttcattggtaaaaacgttactggtatgccacaaggtttccccctgggatttcagcgcctcgaccagcgccggatggcaatggcccagcgcagtcactgcaatcccgccggcgaaatcaatatactctttgccctgctgatcccatactcggctgcctttacctttgaccggaataaagtccgccggtgcataaacaggcagaatcacctcatcaaaagttgcgcgcgtaatagccatttgttcagttgccatatcattaccacccggttaagtagaaatgccagtgaaattataatcacaaaatatgaataaaaaatcactcaatagcaaccacaaatcaacgccggaggaaatttttcagcagagcgtgtccttgttcgctgagaatactttccgggtggaactgcacgccttccagatcccactcgcggtggcgaatgcccataatctcctgcgtttcgctccaggcggtgatctcaaaacactcaggcaacgtggcagggtcgacaatcagcgagtggtaacgtgtcacggttaacgggctgggcaatccccgaaacacgccctgtccattatgcgtaacaggtgacgttttaccgtgcatcactttcgctgcccgcactaccgacgcaccaaaggcctgcgccatcgcctgatgacccaggcaaacgcccagcatcggaatacgtccggcataatggcggatgaccgccagtgaaatgccagcgtcattcggcgtacaggggccaggagagataacgattttttgcgggttcaaagcgtcaatgtgcgccagcgttagcgcatcattgcgccggacctgcacttccgcgcccagttcacaaaaatactggtagaggttccaggtaaaggaatcatagttatcgataagcaggatcatggcggctccgggtgagtagaaccgcactattttactcagtttcgcgagcttcgcttatcgctttctgaaaaatcgcccgcaaagcggagagatcgcccatcgcgccgctctggttcgcctgcttccatgtttcaaccgcaataccttgccaactcagcgcgtagcctgcatgtagcgccagttgttcaaagaagatgcgctgcgccaacccgctcccaaaacgaaacggatgaagcacattaatttcacagtagtaatgcgccagccgctcgacaaacttctcgtgcgccagaccaaccaggtagccctcttcttccagatcctgcatcagagcgttgccctctttttcgatataggcaaagtggcaaaaacgggtatcgccctggtaaatatcgacctcccgcagttgccctgcccagtcgaaaatatcctgatagagctggcgatgaatcgcgcacagatgaggcaagccgcgtaccagcggccccagttcaatcgtagcggcgcggagcgcggtcatttcgtatgccgcttgcgccagtcgctgggcctgatgaatccccagccgattacgcatcacattcagccccggatagaggtacggatcgcgtccttcgccaaatttatcgctcatagtgcctccgaagctcgtcaagacgtaccagcgcttcgtcggcagtcagggttactaaggggatctcaataccttcgagacggcggctttgctggaagttaacgttgcgccgttgctcccaaaagcgtgacttttgtttatcggtaagtttcttcacctggcctccctgaatatgcctgtgcttgaccacaagtataagcagcaatttcaggttacgctgagacagggagaaaacgcgggcggctcgcacccgcgcaggcatgttttatggcaggactttcgcggaaaggataacgactggttttgtcggcacattctgataaggcccgacatcgtgcgtcggtacctgtgagattttatcggcgacatccataccttttaccactttaccaaataccgcatagccaaagtcgcgctggccgtggtcgagaaaagcgttatccgcgacgttaataaagaactggctggtggcgctgtctttatctgcggtgcgcgccatcgcgatcgtgccgcgagtattacgcagaccgttgtcggcttcattcttaataggcggattcggtttcttctgctgcatctgctcgttaaaaccaccaccctgaatcataaagccaggaataacgcggtgaaacgtagtgttgttatagaaaccactgttgacgtaatcgacaaagtttttcacagaaaccggcgctttctggctgttcagctccagctcaatattcccggcggaggtggttaacagcacatgaggatcgccttttgctgccaacgctgcgggagaaagagcagaaagagcgaaaacagctgcgacagccgccagagtcgatttgagcatgagatttccttaaagagagcagaaataaagcaagtggaatgattttaaagagccttcctgggccaggccagccctttacctaattttacgtatatgaaacaaatgtaacgttacgacgcaacgccgtattcttgcaatatgatgtgacaaacatcacattaaaaaatgcaatgaacattactatcactaataattatttaaatgcatcacaaaagcgcctaaaatctgcccgcttaacgcgccctccacgcgcttcacttctcttcaaggccagacatgactaacagcaaccgcatcaagctcacatggatcagctttctttcctacgccctgaccggggcgctggtgattgtcaccgggatggtgatgggaaatatcgcagactattttcatctgcccgtttccagcatgagtaacacctttacttttctgaacgccgggattttgatctcgatcttcctcaatgcgtggctgatggaaatcatcccgctgaaaacacagctacgctttggttttatcctgatggtgctggcggtggccgggctgatgttcggccatagcctggcgttgttctcagcggcgatgtttgtgctggggctggtcagcgggatcaccatgtcgattggcaccttcctgattacgcaactttatgaagggcgtcagcgcggttcccgactgctgtttaccgactccttcttcagcatggcggggatgatttttcctatggtcgccgccttcctgctggcgcgtagtattgagtggtactgggtctacgcctgcatcggcctggtctacctggcgattttcatcctgaccttcggctgtgaatttccggcgctgggtaaacatgcgcagcactctcaggcgcctgtcgtcaaagaaaaatggggcattggcgtactgtttctggccgtcgccgcgctgtgctatatcctcggtcaattaggctttatctcctgggtgccggaatacgccaaaggcctcggcatgagcctgaatgacgccggggcgctggtgagtgatttctggatgtcctatatgtttggcatgtgggcgttcagctttatcctgcgctttttcgatctgcaacgcattctgaccgtactggcgggtatggcggcggtactgatgtatctgtttattaccggcacgcaggcgcatatgccgtggtttattctgacgctgggcttcttctccagcgccatttatacctccatcattacgctgggatcgcagcaaacgaaagtggcctcgcctaagctggttaacttcattctgacctgcggcaccatcggaacaatgctgaccttcgtcgtcaccggcccgattgtagcgcacagcggcccacaggcggcgttactcaccgcgaatggtctgtatgcggtggtctttgtgatgtgctttgcgctcggctttgtatcccgtcatcgtcagcatagcgcgccggctacgcattgataatccttgccggatggagacatcgccctccggcactctatcccccctcctgacggggtaggcctgttggtctaaaaacccctcattttgtatgttatttgtacaaacctgaaaagcctgacaattccgccacttataaaaatccagacaaatcagccatatacccattaagaggtatataaaggtgaatttgatttacatcaataagcggggttgctgaatcgttaaggtaggcggtaatagaaaagaaatcgaggcaaaaatgagcaaagtcagactcgctattatcggtaatggtatggtcggccaccgctttattgaggatctccttgataaatccgacgctagcctgttcgacattaccgtgttctgtgaagaaccccgtaaagcctatgaccgtgtccacctgtcatcctacttctctcaccacaccgcggaagagctctctctggtgcgtgaaggattttacgagaagcacggcgtaaaggtactggttggcgaacgcgcaattaccattaaccgtcaggagaaagtgattcactccagcgcgggtcgtaccgtttattatgacaagctgatcatggcgaccggttcctatccgtggatcccgccgattaaaggctccgaaacccaggattgcttcgtttaccgtaccattgaagacctcaacgctatcgaagcctgcgcccgtcgcagcaagcgcggggcggtggtcggcggcggtctgctggggctggaagccgctggcgcgctgaaaaacctcggcgtggaaacgcacgtcattgaatttgcgccaatgctgatggcagaacagctcgatcagatgggcggcgagcagctacgtcgcaagatcgaaagcatgggcgtgcgtgtacacaccagtaaaaacacgcaagagattgttcagcagggtaacgaagcgcgtaagactatgcgttttgccgacggcagcgagctggaagtcgatttcatcgtcttctctaccggtattcgcccccgcgacaagctggctacccagtgcggtctggccgtcgcgcagcgcggcgggatcgtgattaacgacacctgccagacgtccgacccggatatctacgctatcggcgagtgcgccagttggaacaaccgcgtttacggtctggtcgcaccaggctataaaatggcccaggtcgccgttgaccacatcctcggcagtgaaaacgcctttgaaggggcggatctcagcgccaagctgaagctgctgggcgtggacgtcggcggcatcggcgacgcgcatggccgcacgccgggcgcgcgtagttacgtttacctcgatgaaagcaaagaagtctacaaacgtctaattgtcagcgaagataacaaaacgctgctcggcgcagtactggtcggcgacaccagcgattacggcaatttgctgcaactggtactgaacgccatcgaactgccggaaaacccggattcgctgatcctgccgtcgcacgcgggcagtggtaaacccgctatcggcgtggataaactgccggacagcgcgcagatctgctcctgcttcgatgtgactaaaggcgatctgatcgccgctatcaataaaggctgccataccgtggcggcgctgaaagcggaaaccaaagccggaaccggctgcggcggctgcatcccgctggtgacgcaggtactgaacgccgaactggcgaaacagggtattgaagtcaacaacaacctgtgcgagcactttgcttattctcgtcaggaactgttccacttaatccgcgtggaaggtatcaaaacctttgaagaactgctggcgaaacacggtaaaggctacggctgcgaagtgtgtaagccgaccgtcggttcgctgctggcgtcgtgctggaacgaatacatcctcaagccgcagcacacgccgctacaggatactaacgataacttcctagcgaatatccagaaagacggtacttactcggtgatcccgcgctcggcgggcggcgaaatcaccccggaaggtctggtggccgtgggtcgtatcgcccgcgagtttaacctctataccaaaatcaccggttctcagcgtatcggcctgtttggcgcgcaaaaagacgatctgccggaaatctggcgtcagttgattgaagccggtttcgaaaccggtcacgcgtatgccaaagcgctgcggatggcgaaaacctgcgtcggcagcacctggtgccgctacggcgtgggcgacagcgtcggtttcggcgtggagctggaaaaccgctacaaaggcattcgtaccccgcacaaaatgaaattcggcgtctccggctgtacccgtgaatgtgcggaagcgcagggcaaagatgtgggtatcatcgccacggagaaaggctggaacctgtacgtctgcggtaacggcgggatgaaaccgcgtcatgcggatctgctggcagccgatctcgatcgcgacacgctgatcaagtacctcgaccgctttatgatgttctacatccgtactgccgacaaactgacccgtaccgcgccgtggctggataatctggaaggcggcatcgagtacctgaaatcggtcatcatcgacgataagctgggcctgaacgaacatctggaagaagagatggcgcgcctgcgcgcagcggtggtctgcgagtggacagaaaccgttaacaccccatccgcacaggttcgctttaagcactttatcaacagcgacaaacgcgacccgaacgtccaggttgtgcctgaacgtgaacagcatcgtccggccacgccgtatgaacgtatcccggtcactctggtggaggaaaacgcatgagtcagtggcaaaacatctgcaaaatcgatgacatcctgccgggaaccggcgtctgcgcgctgtcaggcggcgagcaggtggcaattttccgtccttaccatagcgatcaggtgtttgcgatcagcaacatcgacccgttctttgaggccagtgtgctgtctcgtgggctgattgcggaacaccagggcgaactgtgggtcgccagcccgttgaaaaagcagcgcttccgcctgagcgatggtttatgcatggaagatgagcagttttctgtgaaacattacgacgcgcgggtaaaagacggcgtggtgcagttgcgcggttaattatttttgggaggcgcaacgcctccccttttttgtattttttttcattttaattgttatcacaaaatcatttgtactgcatcgcggcggcaactgagcaacaaattcgtcaggaacgaatttgaacagccgctggctgccttcggtgagggacaaggatgtccctcattaatccccaggagcatagttcactatgtgactggggtgagcgagggcagccaacaaagaggcagtgcaaaggatgaagtgagaaaaggataatcaaatgtttacagacactatcaataagtgtgcggctaacgctgcgcgcatcgcacgcctgtcggcgaataatccgctcggcttctgggtcagttcggcaatggccggggcttatgtcggtctcggcatcattcttattttcaccctcggcaatctgctcgacccgtccgtacgtcctctggtgatgggagccaccttcggtatcgccttaacgctggtcatcatcgccggttccgaactgtttaccggccacaccatgttcctgacgctgggcgtcaaagcaggcaccatcagccacggtcaaatgtgggctatcctgccgcaaacctggctcggcaacctggtcggttccgtgtttgtcgccctgctttacagctggggcggcggcagtttattgccggtcgataccagcatcgttcactcagtcgcgctggcgaaaaccaccgcgcccgccacggtactgttcttcaaaggcgcgctgtgtaactggctggtttgtctggcaatctggatggcaatccgcaccgaaggcacggcaaaatttcttgctatctggtggtgtctgctggcgtttatcgcttccggctacgagcactccgtcgcgaatatgacgctgttcgccctctcctggtttggtcatcacagcgacgcctataccctggccggaattggtcataacctgttgtgggtgacactcggtaatactttgtccggtgtcgtattcatgggattgggttattggtatgctacgccaaaatcggagcgtccggctccggcaaaaatcaatcagccagaggctgctgccaataattaaggggtaatgtcgtggaccatttgcctatattttgtcaattacgcgaccgcgactgtctgatcgtcggcggtggcgatgtcgcagaacgcaaagcacggttactgctggaagcaggcgcacgtttaacggtcaatgcgctaacctttattccacagttcaccgtatgggcaaatgaaggcatgttgactctggttgagggaccgttcgacgaaacgcttctcgactcgtgttggctggcgatcgcggccactgacgacgataccgtcaaccagcgcgtcagcgacgcggcggagtcacgccgtatcttttgcaacgtggtggatgcgccgaaagccgccagctttatcatgccctccattattgaccgctcgccgctgatggtcgccgtctcctcgggcggcacctccccggtgctggcgcgtctgctgcgcgagaaactggaatcgctgctgccgcagcatctggggcaggtcgcgcgctatgccgggcaactccgcgcccgagtgaaaaagcagtttgccacgatgggcgagcgtcgtcgcttctgggaaaaatttttcgtcaatgaccggctggcgcagtcgctggcgaatgccgatgagaaagcggttaacgcgacaaccgaacgcctgtttagcgaaccgctggatcaccgtggcgaagtcgtgctggtcggcgccgggccgggcgatgccggactgctgacgctgaaagggttacaacaaatccaacaggcggatatcgtggtttacgatcgcctcgtctccgacgacattatgaacctggtacgccgcgatgccgatcgggtctttgtggggaaacgcgcgggttaccactgcgtcccacaggaggaaatcaaccagatcctgctgcgtgaagcgcaaaaaggtaaacgcgtggtacgcctgaaaggcggcgatccctttatctttggtcgcggcggcgaagagctggaaacgctgtgtcatgccggtattcctttctcggtagtgccggggattaccgcggcttccggctgctccgcctactccggtattccgctaactcatcgcgattacgcccagagcgtacgtctggtcacgggtcacctgaaaaccggcggcgagctggactgggaaaacctggcggcagaaaaacagacgctggtgttctacatggggctgaatcaggcagcgactatccaggaaaaactgatcgcattcggtatgcaggccgatatgccggttgcgctggtagaaaacggtacctccgtgaagcaacgcgtcgtccacggtgtgctgacgcagctcggtgaattagcgcaacaggttgaaagcccggcgctgattatcgttggtcgcgtggtagccttacgcgataaattaaattggttctctaatcattaattaaaataacgccctgttattcagggctttattttacaactactcgtaatctcaaattatttttacttaaaagtgaattaagaaaccaactttaaatacaccggacaaatttaaataataattctgcctaaaaacccttttactcgtcaaattcacctcttattcattcatacaataaataacaccgttaagcactcaatttgacctgacctggttatcgggtgataaaataaacactaaagcataatttttcttctggccatttcatcattgcctgtaccgctctctgcatatgtttagtacgcaaggaaaatattaattaaggatgaaccctatgcaaaagaaaaaacttatttctatcgctatcgctttaacgctacaaagttattacattccggccatcgccgcagaaaataacgatgatgaaaaagaatgtcccagtaatatctcctccctgcctaaagaaaaacgcgcaaaactctcaccgacctgccttgctacacctgaaaatgataatcactggggctgggttgctggcggcgttgctgcattggtcgcaggtgtggctattggcgttgaaaataacggtggcggagattctaatcattcttataccccccctaagcccgataatggcggcgacgtcaccccgcccgacgatggcggcaacgtcaccccgcccgacgatggcggcaacgtcaccccgcccgacgatggcggcgatgacaatgtgaccccgcccgacgatagtggcgatgacgatgtggccccgcctgacgatagcggcgatgacgatgtaaccccgcccgacgatagcggcgatgacgatgtgaccccgcccgacgatagcggcgatgacgatgtgaccccgcccgatgatagcggcgatgacgatgtaaccccgcccgatgatagcggcgatgacgacgacacgcccccagatgactctgttattaccttcagcaacggcgtcaccatcgataaaggcaaagacaccctgaccttcgacagcttcaaactggataacggcagcgttcttgagggtgccgtgtggaattattcagaacaggacaaccagtggcagctcaccaccgcggacggtaaaacgctgaacgtcaccggctgggacgtgaccgacgccaatgccgccgtgattgaaggcacccaggaaaacggtctctactggaagtacgacagccggggctatctgattattgccgacgataacaccaccgttatcagcggcgatgaccaggcgcataattccgatcgcggcatggatatcagcggccaggatcgcaccggcgtgattatttccggcgatagaaccgtcaacacgctcaccggggactccagtgtgaccgacggtgccaccggcatggttatctccggtgacggcaccaccaacaccatttcgggccactccacggtggacaacgccaccggcgcgctgatttccggcaacggcaccaccaccaatttcgccggtgacattgccgtgagcggcggcggcaccgccatcatcatcgacggcgacaacgccacgattaagaataccggtacctctgacatcagcggcgcaggctccaccggcaccgtcattgacggcaataacgcccgcgtcaacaatgacggtgatatgaccatcaccgacggcggcaccggcggccacattaccggcgacaacgtggttatcgataacgccgggagcactaccgtcagcggcgcagacgccacggcgctgtatatcgaaggcgacaacgcgctcgttatcaacgaaggtaatcaaactatctctggcggcgccgtcggtacgcgcattgacggcgacgacgcccataccaccaataccggtgatatcgcggtggatggcgcgggctctgccgccgtgattatcaacggcgacaacggcagcctgacccaggcgggcgatctgctggtcaccgacggcgcgatgggcatcatcacctatggcaccggaaatgaagcaaaaaataccggcaacgccaccgtacgtgatgcggactcggtgggttttgtggttgcaggcgaaaaaaacaccttcaaaaacaaaggggatattgacgtcagccttaacggcaccggcgcgctggtgagcggcgatatgtcgcaggttacgctggatggcgatattaacgttgtctcagtccaggacagcgaaggcgtgtttagctcagcgacaggggtgagcgtgagcggcgacagcaacgccgttgatatcaccggcaacgtaaatatcagcgccgactacgggcaggatgatctggctgccggggctccccgttaaccggcgttgtcgtcggcggtaacggcaataccgttacccttaatggcgcgctgaatattgatgacaacgatctgtccgccaccggcggacaatacctggacgttgttggcctgagcgtaacaggtgatgataacgacgttgagattgacggcggtattaatatcacccacagcgaggatccacttgatggaacctctgcagacattaccggcatcagcgtcagcggtaacagtaccgttacgctaaacggtcattctaccattgataccaacacggtagtgggggggcacgttgtactggcgcgggtcaacaacggcggctccctgattctgggtgatgactcagttgttgacgttaatgtcagttatatacccacaggctattacacctacaacgcgttgctgatggctgatggcgaaggcacatcaattgaaaataaaggcgatattacaagccatggcgtgtattccgtcattcgcgcagataacggctcggaagtcagcaacagcggagatattctggtctacgcgaccagtagcaacagtagtgaggatcgtgcagccatcacaagggctagtggcgagggatcggctgttcataacaaagccggcggcgatatcaccctcatttctgatcagacgccgcagggcagtggcggtattgaagtatacccattgaaatggtacacccacaccttttacgccatgatggcttcggattatggcgatgtcgttaacgatgagggcgccacgatccatttgcagggggcaggtgtatatggcgttaccgccagccgaggtaaagcactaaacgaaggcaatatctatctggatggccttgtcccgacgctggacgatgaaaataacatcaccagcaccagctactggcagccatcatcgctctatctcaccagctcaggaatggtggcgggttccaccgatgccgatggcgacgccaccgccatcaacaccggcaacattaccgtcaacaacgccgggttcggcatgatggcgcttaatggcggcaccgccattaaccagggcgtgatcaccctgaccgccgatgacggcgtgaccggtcaggcagacgagctggtcgggatggcggcgctcaacggcggcgtcgtcatcaacgacaccagcggcgtgattaacatcgacgccgattacggccaggcgtttctgagcgacagttccagctacatcatcaataacggctctatcaaccttaacggcagcccgatggatgatactgattcacacatgggcggcacgccaacggacaaaatctggattcagtctctgcccggcagcggcgacagcgacaccaggacctccgacacaggtttcttcaccgccggtacgctggccaactacggtactgaaaccctgaacggcgatgtggacgttaacgggggctggctgtacaacgaagcgggcgcctcgctcaccgtcaacggcaccgtgacgattaacggcggggctaacgcgctggctaactacgggacgctggacgcggacgctatttccacctggcacagcctctttaatgaagcggacggcagcatcaccaccgatctgttaacccttaatggcgacgtcactttttacaataacggcgatttcaccggctccatagcgggcaccagctaccagcaggaaatcgtcaatactggcgatatgacggtggcggaagatggcaaatcgctggtcagcggcagcttctatttctataacgaagaggacgctacgcttaccaacagcggcagcgcggtggaaggcggcgagaacaccatcatcaatctgacgcgcgccaacgattcgctgacccaggtgaacagcggcaccatcaccgccactaacggttacagcgccatcaccacggtcaacggcagcaatgaccccaaatggatctggaacaccgcaaccggcgtgattaacggtattaacccggatgcgccgctaatcaatttgggccgcggctataacttcggcaaccagggcactatcaacgtgcagggcgataacgccgtggcgattagcggcggcaccagcagttatgtcattaacctggtcaatagcggcaccatcaacgtcggtaccgagcagggcaaggaggacggcaccaacggcaccgggcttatcggcatcaagggcaacggtaatgccacccccataaacaacaccgcagacggcgtgatcaacgtttacgcggatgactcgtatgcgtttggcggcaagaccaaagccatcatcaacaacggcgaaatcaacctgctgtgcgacagcggctgcgacatctacgcgccgggtactacgggcacgcagaacgaccataacgggacagcggacatcgtcatcccggatgcgactaccgccccgaccgagggcagcatcccgacgccgccagcggatcccaacgcgccgcagcagctctccaactatattgttggcaccaacgccgacggtagctccggtacgctgaaagccaataacctggtgattggcgacaacgtgaaggtggataccggctttaccagcggtacggcggataccaccgtggtggtggataacgccttcaccggcagcaatatccagggcgcggacaacatcacttccaccagcgtggtgtggaacgcccagggtagccaggatgccgacggcaacgttgacgtcaccatgaccaaaaacgcctatgccgatgtggcgaccgacagctcggtaagcgacgtggcgcaggcgctggacgccggttacaccaacaacgagctgtacaccagccttaatgtggggactaccgccgagctgaacagcgcactcaagcaggtgagcggtgctcaagccaccacggtattccgtgaagcgcgtgtactcagcaaccgctttaccatgctggccgacgccgcgccgcaaattaaagatggtctggcgttcaacgtggtggcgaaaggcgacccacgtgcggagctgggcaacaacacccagtacgacatgctggcattacgccagacgttggatctcaccgccagccagaatctgacgctggagtacggtattgcgcgtctggatggcgacggttcgaaaactgcgggcgataacggcctgacaggcggctacagccagttctttggcctgaagcacagcatggcgtttgatgaaggtctggcgtggaacaacagcctacgctatgacgtgcataacctcgacagcagccgttctgttgcctatggcgatgtcaacaaaattgccgattccgacatgcgtcagcagtaccttgagtttcgcagtggaaggggcgaaaactttcaccatgatgggcgatgcgctgaaagtcacgccgtatgccggggtgaaattccgtcacaccatggaagatggctacaaagagcgcagcgccggagattttaacctgtcgatgaactctggcaacgaaacggcggtagactctattgtcggcctgaagctggattacgccgggaaagacggctggagcgccaccgctaccctggaaggtggcccgaacctgagctacagcaagagccagcgtacagcgtcattacagggtgcggcgggtcaatcgttcggcgtggatgacggtcaaaaaggcggcggcgttaatggtctggcaaccatcggcgtgaaatacagcagcaatgataccgcgctacatctggatgcctaccagtggaaggaagacggtatcagcgataaaggctttatgcttaacgttaagaaaacatttcgttaaataaacgacattatataacactaataaatatcctccggcatagccggaggtttttcagatgcgcctataaggctctcttaccagccgcgccctaacaggcgcatacgatctgacatttgcatcaaacttcgttacttacggcccgtaaacgggctgcccggatacgggatcgataattgctcacccattttatcctcttcaagctggtgctttatgtagtcctgtatcttcgccgtgttcttacccaccgtatcgacatagtaccctctgcaccagaactccctgttcctgtatttgaattttagatccccaaactgctcgtaaagcatcagactacttttacccttcagatatcccatgaaactcgacacactcatcttcggcgggatctccagaagcatgtgaatatgatctgcacaacattctgcttccagaattcgtacgtttttccattcacacaattttcttaatatgctgcctactgccctacgcttctctccatagaacgcttgtcttcggtatttgggcgcgaaaactatgtgatatttacagttccatcgggtgtgcgctaagctcttttcgtcccccattgggacccccttttgatttcttgttgaacttttgcagttgccagaccgcaagatgttttaacaaatcaaaaggggttttaataactggcttaaagctgaaagctttccggaacccccagcctagctgggggttttccatagacaataaaggccgcttattattaagcggcctttttaaatcatatcccctggtaaagataaagtccttatttggactacctggatgattcattaattgctatcgtactatacgctaaatagatcttatatttattccaccagtagtgctcgttttatcaacaaggattttgaaatgtttaaatttgtaaaaattgccgttgtagcaggggttctggcgacgctcactgcttgtactggtcatatcgaaaacaaaaaaaataactgcagctacgattatttgctgcaccctgcaatttctatttctaaaattattggcggttgcggcccggctgccgatcaataatagaaacgactgcgcagatacaaaaaaaccgggattttcccggtttttttacaggtctgataaacggtacggcacaggtgccttgtccaacttacgctcgttggtaggcccgataagctagcgccatcgggcacgcaataacccttacggtttcgccacaaagccaatggcttcgtaaacggctttcagcgtttcggccgcacgtgcgctggctttttccgccccgtctttcatcaccttctgcaagaacgcttcgtcgttgcggaaacggtgatagcgctcctgcaactcagacaacattccggaaaccgcctccgccacttcgcctttcaaatggccatacattttaccttcaaactgtttttccagttcaggaatgctctgaccggtcacggcggaaagaatatccagcaggttagagacacccgctttctctttcacatcataacgcaccaccggcggctcgtcggagtcagtgaccgcacgtttgattttcttcactaccgatttcggatcttccagcaagccgatcacgttattacggttatcgtccgatttggacattttctttgtcggctccagcagcgacatcacgcgcgcgccggatttgggaataaacggttccggtactttgaaaatatcgccatacagcccgttaaaacgctgggcgatatcgcggctcagttccagatgctgcttctgatcttcgcctaccggcaccagattggtttggtacaacagaatgtctgccgccatcagcaccgggtaatcaaacaggccggcgttaatgttttccgcatagcgcgcagatttatctttaaactgcgtcatacggctcagctcgccgaaataggtatagcagttcagcgcccagccaagctgcgcatgttccggcacatgggactgaacgaaaatagtgctcttttcaggatcaataccacatgccaggtacagcgccagcgtatccagcgtcgctttacgtagctgctgcgcgtcctgacgcacggtaatagcatgttggtctacgatgcagtagatgcaatgatagtcatcctgcatgtttacccactgacgcaatgcccccatatagttgccaatggtcaattcacctgagggctgtgcgccactaaaaacgatgggcttagtcattttttatttcctggttatcgctatgcggaagcccaagtgcgggcaaaagatcgttaaaactgtcataaatgacgtccggctcgctaagagcgatcgcttcgccataattgtagccgtatgtcaggccaaccgaagggcagcccgccgcttttgcagcctgaatatcattacgcgaatcgccgacaaaaagcatctgctccggcatcatgcccagccggcttgccaccagcaacagcggctccggatgcggcttcttattttgcacatcatcgccgccgataaccacactaaagtatttggcgatatcaagcgattccagcaacggcgcgacgaacggcgtcggcttattcgtcaccagacctaatgacaatccgctggcgtgcagcgcgcccagcgtgtcggcgacatggggaaataaaacggtgccctcttccgccacttcgccataatacctgtcgaacagcttacgcagaatacgtacctgttcctcggcaggaatatcttcatcaacgggcggtttacccatcgtcttacgcagcgtggcgcgctcctcgcgagcccaggtcagcgcgcgttccatcaatacgtctgcgccgttaccaatccaggtaatcacgcgctcctcgcccgcgaccggcagttccagcgcatacagcgccatatccaccgccgcggcaagacccggcgcgctatccaccagcgtgccgtcaagatcaaaggcgacgccccgaatattctgcaacttatccatgagttacctttgccagctcactgcgcatttcatcaatcacttttttatagtcgggtttatcgaaaattgccgaccccgcaacaaacatgtccgcacctgctgcggcgatctcgccgatattgttcaccttcacgccgccgtccacttccaggcgaatgtcgtaaccggacgcatcaatgcggcgacgcacttcgcgcagtttatccagcgtctgcggaataaaagactggccgccgaagcctgggttcacggacatcagcaggatcacatccagtttgtccatgacgtaatcgagataactgagcggcgttgccgggttgaataccagccccgctttacagccgtgttctttaatcagctgtagcgtgcggtcaacatgttcggaggcttccgggtgaaaggtaatgatgctcgcgccagcggcggcaaagtcgggcacgatacggtcgactggcttgaccatcaggtggacatcaataggcgcggtaataccgtactgacgcagggatttcagcaccatcgggccgatagtcaggttcggcacatagtgattatccatgacgtcaaagtgtacaacatcagcaccggcagccagcgctttggcggtgtcttcacccaggcgagcaaaatcagccgacagaattgagggggcaatcaaatactgtttcatccgcttctccttgagaattattttcttgcaggcgttgcgactcctggttggtacagagccagcagttcgtccacctttttacgtgtgccgccgttgctgcttatactgcgtctaactttgacgacatgcaattttgcgagttgataccactcgcgtgtgagcgccgtatcatggttggaaatgagcaccggtatccggttactgaccagattctcagcgatttccgccagatgcgcttgttgcgtcaggctaaaactattggtgtgatacgctgtgaagttagccgtggcggacaacggcgcataaggcggatcgcaatagaccaccgacgacttgtccgcacgcgccatactgtctgcgtatgactcacagtaaaagaacgcattctgcgctttttctgcaaagtggtacaactccgcttccgggaagtaaggtcttttataacgaccaaacggtacattaaattccccgcgtaagttatagcgacagagtccgttataaccgtagcggttcagatataaaaacagtaccgcccgacgaaaggggtcctggcaggtgttgaactcctcgcggagttggtaatagacctcagcctggttagtttcaggcataaacagctcgcgcgaagcctgtacatactcgtcagtacgtaacttcacgatgttatagaggctaataaggtcgctgttgatatcggcgaggatataacgagaaaagtcggtgttaagaaacaccgatccggcacccacaaaaggttcgacaaggcactcgccttttggcaaatgtcgtttgatatcatcaagcagagggtattttccccctgcccacttcaaaaaagcgcgattttttttcatgctgactaactaattacaccttctccggctgtggagaaagctccgacagcatcctgcgctttaggctgtgccgcgttgctttacggcgcatttgacggtagcaaatgcgcccctcgcgcctgtcctgaacaaaaatagctgtcagcgacactcacaggcaattgcaggacacagcctggattatttcagatcggcctgaacctgatgcaacggttttgcccacgggtttttcgcctgcacatcggcaggtaaggtggacaccgcacgtttagcatcttctttcgaagcatacatccccgttaccagcacataccacggttgtccattacgcgtcgtctcgtataccacataatttttcaggttctctttcttcgcccaaccgttcaggttgtcgtaatttgaagaactactgagctgcaatgtgtagtggctggatggcgcgctctttaatgcgccaacgttgccggcgcttttcccgccgcctgcgacaggcgtcgtcgaggcttgcgctggcttcgcggtttgtaccggcgcagcgcttgccgtcgctgtcggcgcagccgtcgtggtggtcgctttcggcgtcgcggctggcgctgccggttccgtgcgtttcactggcgcgaccggtttcttcggttccgcagtggtggttttcgccgtggtctgcggtttcttaggttcaatgacggcctgtttacgttccggacgcgtggtatgacgctcggcaggttcgctaaccgccgcctgacgcgtcgtgctgccattgcgaactggcgcgacggttgcaggctctgtcggcaacgtagagttcaccgcaacattgttcatctgctctggattctgcgtcagcgcattattcagatcgccctgcacttccacgcgctgctgaccgtcagcgaccacaggcgactgtccctgcgtcggcgttgaagaaatcggcggcaacgaaatatcctgcgacgtattgcccgcggtttgttctgcggaggtggcgcccggcgcaggctgggtcgcattcgcctgatcggcggcgttaccggaaagatcgatactcttttcgccagaggccgacggctcgctggaagacgttgagggggctttcagcgcggagccgataccgataatcaacagcagcagcaccagcacgccaacgcccatcatcatgtattgacgagaggctggcttatgggccgcttttttacgcttacgtggacggcgttcaacacgctcttcgtccaccgtatcgtcttcatcggattcgtactcttcttcaacttcaggttcttcactacgcgctttacgcgtacgcgtcggacggcgatcgtcggcgtccagatcaacgtcatcaaagttgatctgcggttcactatcgcgttctgaagattgacgagaacgaccagtacgacgatcgctgggatcgggtttcagctcgtcttctggtttgaattcatccatttaacaccccactcaaaggttaatgcttacgacattgcacataacctgaagctaaaaaactgacatctacgcaatatcagtttgacctttcttgttgtcacgcctgctgacagtcagcaatcgcgctaagaacgacttcgtgcgacactccgccgcgcacttcacttttccctatggccagcggaagcactaaacgcagctcccccgctaacacttttttatctcgcagcatgtgcggcaaatagtcctgcgcggacatctcgcaagggccattgactggcaacccggcccgttcgagtagagcgatgatgcgctgcgtatcagcagaactgaactgccctaaacgctcggatgcgcgtgcagccatcactatacctgcggcaacggcttcaccatgtaaccaattgccatatcccatttccgcttcaatggcgtggccaaaggtatgtccaagattcagtaaagcacgtaagcccgcttcacgctcgtcggcggcaacaacttcggctttcagctcgcaacaacgacgaatacagtacgccatcgccgggccgtccagacgcaatagcgcatccagattaccttcaagccaggtgaagaagtccgcgtcgagtataatgccgtatttgatcacctctgccagtcccgatgtcagttcgcgtgcgggaagcgttttcaggcaatcaagatcgacaaccacagaagcgggttggtaaaacgcgccaatcatgtttttgccaaggggatggttgacggcggtcttcccgcccacggaagaatcaacctgcgacagtaaggtagttggcacctggatgaaacgaacgcctcgctggtagctggccgccgcaaaaccggtgagatcgccaatcacgccgccgccaagcgcgaccagcgtggtatcacgaccatgcggttttttcagtaacgccgtaaacaccgtatccagcaccgtcaggctcttatactgctcgccgtcaggaagaatcacgctgtctacgttaacgcccgcccgttcgagtacgccgcgaaccttgtccagataaagcggcgccagggtttcgttggtcactaacatgacctgatcgcctgatttcagcggcaagaatgaagctggttcgttaaacaaaccagccgcgatggtgatcgggtaactacgttccccgagagtgactgtaatcctctccatgacgcgacatccaccttagttacttgtgcccgcttacccagcgtattctgcttgaattagttgctttccagcatatgaataatctggtttgccacaaccttagcgctttgatcgtcggtgcgaatggtgacgtcggcaatctcttcgtacagcggattgcgttcgttagccagcgcttccagaacttcgcgaggcggtgcttcaacctgcaacagcgggcgttttttatcacgctgcgtgcgcgccagttgtttttcgatggtcgtttcaaggtagaccacgacgccacgcgcggagagacggttacgcgtttcacgcgattttacagagccaccgccggttgccagcacaataccctgtttttccgtcaattcgttgataactttttcttcacgattacggaagccgtcttcaccttcaacatcgaagacccagcccacatcagctccggttcgtttctcaatctcttgatcagaatcgtaaaattccatattgagttgttgagctaactggcgcccaatagtgctttttccggcacccataggcccaaccagaaagatattgcgtttctctgccattttttcggtactactaagactattcgttaatggtaaacccgcttcacagacacccagcgcagcaggacatgaactgaaacctcataagatattgcgagagtcagactgaaaattatctcaatactcaagcgggtttggcaactgaataaatcaccaagcctgattgttgcaaaacccgagttagcgttgccgaatggcgaccagaacaacatatccggcctacaaattgctctactttcaaacaattgtgcgcaatccgcagaaccaatacgtctgcatcagcggacattcagccgtttatcatcggtcttatgcacaccttcggcaaggcaaagcgcattaatcaatgcgtaagcaacgaaaagcacgactctcaaatcggtactccttgtatgctaaatacatccgcacgtcaaatcccgcagatgcgttcagtgcaaaaacagcgcttttttatgcataaattattctgtcgccaccagtctgggggtgataaacaccactaattcgcgtcgctcgtcctctttaccgtcatggcggaagagctgaccaagccagggaatatcccccaacagcggcacgctatcgctacccgatttattttttcgcgaaaaaataccgcccagcgccagcgtctcgccgctttttacctctacctgcgtttcaatttcctgtttatctatcgccagcacttcgccgtcagcctgttgtagtacctgaccgggaacattctggctgatatgtaacttcaggcggatgcgccctttttgcaaaacggtgggcgtcacctccattcccagtaccgcttctttaaattccacggaggtcgcgccgctttcgccgctggaaacctgataaggaatttcgctgccttgcttgatactggctggctgtagatgcgaagccagcagccgggggctggcgataatatccaacagctgcttttgttccagcgctgacagctccagatccagcaagcgtccgttaatgcgcccgatgttaaacccgacgcgtgaggtggcggcggcgacagataaatcactggaaagcgtcgtcacgtcacccaccgagcccgcttgcgtcgcgtcagccagcgtccactttacgcccagttcccgtagactcttttcgttaatggtaacgatatgcgccgccagctccacctgcgccaccggcagatccatttgcgatacccatttttccagctccgccaaggccgcgcggttatcgcgcaacagcaggcggttggtgcgcttatctaccatgatggttcccttcgcgctcaggagtttctcgcccgctttcgccagttcgccggcatcggcgtattgcaggctaatgctgcggttttccagcggtaaattagcctgaaaccttaaccgctcggcatcctgccgcgcactgtgttctttctgccaggcctgtgaatgaacatggagaatattcccctcctgacgtagcaccagccccgcgctattgaccaccgtctgtagcgcctgtttccacggcacatccgtcagatgtagcgataatgtcccgctgacgtccggcgacaccaccagattctgccgctcctgctcggctaaagtctgcaaaacctgcaccacagggacgtcatcaaccaccagcgtcactttcgccgcttttcccgcctgcgcggcgggcatcaaggctatcagtattatggctatccatcgcttcattgtccgctccctgacgtagccaccgccactgcggcggcgcacaatttttaccggtcgttaacgttaaggtttccgccgtcaggcggacaatcgtccaaccgttttccagcgtctgcccttcttccactcgtcgccatttttgctgactgtctttaagaatgcctgtccatcgctcgcctttacgcaccgcgccctgataccgccactgcgagagttccgctatccggcagcgatcttccggcgggcggaagggatcgcgcattcctgtcaacatcagcaaacaaaaacagagcaatacactgcggctagccttcattcgccaggcgctccagttgcagcgtcatcaataattccgccccctctttacgcaatgaaaaccgacttacgctcatctcgctttcggccaaccggacaaacagcgacggcaccgcatcccaggacgttttcagcgccatttctcccccctgcgccgatggctgccagtgcagcaaacgcaggggaggcgcctggaaatctaacggcgaaaaaggacgcggattttccactgtgcgcccgaaaagcggttcagccgcgacgctcagacggcgcagatgacgccactgttgccgggcggcctcgcgctgctggcttaaccgcgtttgttgcgtatccaacgttttccagccgggatagcccacagataacgcaaccgtcagcgtcaggcacagcacgcctgcacaccaataaaaaacccgaccacggcgcgacatcccgtaccagatatcaaagagcgcgttcacgggcggcgctcctcgttaactgataatggaactgccagcgcccttgcgcatcctgccgcgtggcgcccgtgcggtttagcggaaaactgacatagtgacgaagtgatgtctcaagcgtgagcagggcgtcaaacgttctcgccagcccttccagctctagcgtctcttgctgataattgaggcttgtcagccatgcctgctctggcaacaggttggcaaggtcagtcaagatagattgccaggcttgcgtcagttcacgctgcgcctgacgttgtaatcgcgcctgttgctgccgctgacgctgctgcaactgcggtatgttcgccgcaagcgccgtcgtgcgtccgttttccgtcgtcagtagcagctcgttaatcctcccctcctgccaaaaaaccaaccgggcgatcgtcgcgaggcttgctatcagcagcagggacgcgccccataccacgcaccacagccgcagacgcgctacgtaatgttggcgccgccaggggagcaaattgacagaatgcgccatcagcgtatctcccccatggctaaacccagcgcaatcgcaaagcgataaccgtccggcggaaccggcggttggcggacggtaacggcgtgccaggggtcgaattcgccttcggcgcataacgaaatatgttccggcacgacggataacgtcgcggcaaggtcatgcagcgtcatcgcctctcgcgccgatttacgtccccacgcatagcgcgtcgcccacagccactggctctcatcgcgccagaccagacattgccgccccgaaggtataaacggcagcaagcgctgtaacgcgcaggcatcgggcgttacagcagcgatgcgcacattgagcgtttgcgccagcgttaacagctctgaaatttctttgctttgcacggcggtaacgttgaacgcagggcttagcgcatcgtcctgaaagtcgaaacgcaataagtccggatccatatccagctcacgcgccatcgtttgtgaaagccatgcgacttgctcacgttcccgcagacgcatcggcggatgtggaaaagcgcgttgcaatgtccgatttgcgggaaaagagagataaatacggtgacgtagcggcagctcgcggctccagggtcgcagtacgtgagccagcgattgcgggtcaggaatcgtaccctctgccgtggaggcgttcatcagcggcagtcgccaccaacgttgcagagaccagcccgatgcgccgtgaataacggcgatggccagcgcttcatgctgctgaatatgcaatcctatttgccaggttttaaaagccataacggtcgatctccttatcacccgtcgcgttaacgggtatatcaatgcgtctggcttgcctttatactaccgcgcgtttgtttataaactgcccaaatgacactaaatgggaagtctccagtgaagttcgtaaagtatttattgatccttgcagtatgttgcatcctgctgggagcaggctcgatttatggcctttatcgctatattgagccacagctacctgacgtcgcgacattgaaagatgtgcgtttgcaaattccgatgcaggtttacagcgcggatggcgaacttatcgcgcaatatggcgaaaaacgtcgtattcccgttacgctcgatcaaattccgccggaaatgatcaacgcctttatcgccaccgaagatagccgcttttatgagcatcacggcattgacccggtaggtattttccgtgcggccagcgtcgcgctcttctccggtcacgcatcgcagggagcaagtaccattacccagcaactggcgcgaaacttcttccttagccccgaacgcacgctgatgcgcaagatcaaggaagcgtttctggcgattcgtattgagcagttgctgaataaaaatgagatcctcgaactctatctgaacaagatctatctcggctaccgcgcctatggcgttggcgcggcggcacaggtctactttggtaagacggtcgaccagcttagtctaagcgaaatggcggttatcgccgggctaccgaaagcgccttctacctttaacccgctctactcgatggatcgggcgatagcgcgccgtaacgtagtgctttcgcgaatgttaagcgagggatatatcactcaggcgcagtacgatcaggcccgtagcgaacctatcgacgcaaattatcacgcgccggaaatcgccttctccgcgccttatctgtcggaaatggtgcgccaggaaatgtataaccgttatggcgaaagcgcttacgaagatggttatcgtatttacacgaccatcacccgcaaagtgcagcaggccgcgcaacaggcggtgcgtaataacgtgctggactatgacatgcgccacggttatcgcggcccggcgaatgtgctatggaaagtgggcgaaacagcgtgggacagtaaaaaaattaccgatacgttgaaagcgttgccgacctacggaccgctgcttcccgccgtggtcaccagcgctaatccgcaagaggcgaccgctgcgcttgccgacggtacgtccgtttcgctacatatggaaggaatgcgttgggcgcggccttaccgctcggatacgcagcaggggccgacgccgcgtaaagttaccgatgtcgtccagacaggtcagcaaatctgggttcgtcaggtggataacgactggtggctggcgcaggtaccggaagtgaactccgcgctggtttcgcttaacccgcaaacaggcgcggtactggcgctggtcggcggtttcgattttaatcagagtaaatttaaccgcgcgacgcaagctttgcgtcaggtggggtcgaacatcaaaccgttcctctacaccgccgcaatggataaagggctgacgctcgccagtatgctcaacgatgtgccgatttcccgctgggacgccggggcaggttcagactggcgtccgaaaaactccccgccgcagtacgccggaccgattcgtttacgccaggggctggggcagtcgaaaaacgtggtgatggtacgcgccatgcgcgccatgggcgtcgactatgcggcggagtatttgcaacgcttcggcttcccggcgcagaatatcgtgcataccgaatcgctggcgctgggctccgcctccttcacgccgatgcaggttgcgcgcggttatgcggtgatggcgaacggcggtttcctgatcgacccgtatttcatcagcaagattgagaacgatcagggcggcgtgatcttcgaagcgaaaccgaaaatcgcctgcccggagtgcgatatcccggtcatttacggcaatacgcagaaatctgacgtgctggaaaacaccaatgtggaagaggtcgcggtttcgcaagagcagcaaaacagcgccgtaccgatgcctgagctggaacaggcaaaccaggcgctggtcgcgcaaaacggcacgcaggaatacgcgccgcatgtgatcaatacgccgctggcgtttctgatcaaaagcgcgctgaacaccaatatctttggcgaacccggctggatgggtaccggctggcgtgcggcgcgcgaccttaaacgtcgcgatatcggcggcaaaaccggtacgaccaacagctcgaaagacgcatggttctccggctatggtcctggcgtcgtcacttccgtatggatcggctttgacgatcaccgccgtgatttaggccgcaccaccgcttccggcgcgatcaaagatcaaatctccggctatgagggcggcgcgaagagcgcgcaacctgcatgggacgcctatatgaaagccgtgctggaaggcgtgccggaacagccgctaacgccgccgccgggcatcgtcacggtgaatatcgaccgcagtaccggacaactggcgagcggcggtaacagccgtgaagagtatttcatcgaaggcacgcagccgacacaacaggcggtacacgaggtgggaaccaccattattgataatggtgaaacacacgaactgttctgatcaaaaaaggcgctccggcgccttttttattgtgtttagcggatgacggcgaacggggagacaaactttccgttggcttgatcaacgccgcgccatcaggcaattcggccctgcgctttcaaccactcgcgtaccagaaacagcgcgctgacgttgcgggcctcgttaaaatcggggtcttccagcagatccattaaatgcgccagcggccagcgtacctgcggcaatggctcaggctcgtcgccttccagcgactccggatagagatcttccgccaccacgatattcattttgctggaaaaataagagggcgccatgctgagtttttttaagaaggtcaggttatgcgcgccaaacccgacctcttctttgagctcccggttcgccgcttcaaaaacggtctcgcccgggtcgatcaatcctttcgagaagcccagctcataggattcggttcccaccgcatactcacgaataagaatcagatgctcatcaacgatcggcacaatcattaccgcctcacgggttgatggtcgcatacgttcatacacgcgacgcacgccgttgctgaactccagatccacgctttctacgttaaacagtcgggattgtgcgacggtttccactttcagaatggtgggtttttgtaatgatttgctcattgtgagaatctttgcagtgtaatctgtggtcattgtgcgacataccgcacggtttcggcaatgcgaattgccgtttatttacatttatgtaacgtaataaaaattaattcttatttcaaattaaaagtcaataggttgaaataactccaggaatttgctgatattccgtttttggtggtattgctatgatttgccttcactgggatgcgctttacaatgctcaagttcaactccacgcttgccgatagccaaccacagaaaaatgtttattggacagggtgcgactgaccacgcctgacagacttagtaagatggggaaagcatgagcaccattctgatttttatagctgctttgctggcctgctctctactggcaatatggcggttccgggtaaagtccagacgagggagcttaccgtggatcagcgcctttcaggacgcgcaaacgcgtaaactgttgcccgaagagcgcagcgcggtagaaaactatctcgataaccttagccagatccagcaagttccggggccgacaggcgccagtgctgcgcccatctcgctgacgctgaacgcggaaagcaacagtgtcgtgatactaacccactccatcacccgctacggcattaccactgacgatcctaataaatggcgctactacctcgactccgtcgaagtccatctgccgcctttctgggaacagtacatcaatgatgaaaacaacgttgagctgatcctcacggatacgctgccgctggtgatctctttaaacggccatacgctgcaagagtatatgcaagagtcgcgcggctacgcgctacagaataccgcctctacgcaggcgtcgattcgcggcgaagagagcgagcagattgagctgttgaatatccgtcaggagacccacgaagaatatgcgctcagccgcccggctggcttgcgcgaagcgttgttaatcgtcgcctcctttttgttattctttttctgcctgataacgccagacgtttttgtaccgtggatgataggcggcgcgatcctgctgctggcagccggactttgggggctttttgcgccgccgtcgaaaagcgcgctgcgggaaattcactgtctgcggggaacgccccgccgctggggactgtttggggagaataatcaggagcagattaacaatatttcgctgggcatcatcgaccttatttaccctgcccactggcaaccctacattacgcaggatcttgggcaacaaacggatattgatatttaccttgatcgccatgtcgcgcgccagggccggtttttatccctgcatgatgaagtgaaaaacttcccgttgcagcactggttacgcagcactgttattgctatcggttcgctgctggtgttgtttatgctgctgttctggatcccgctggatatgccaatcaagttcacgctatcgtggatgaaaggcgcgcaaaccattgaagcgacaacggtaaaacagcttgaaaaagctggcgtgcgggtgggcgatacgctgcacctgagcggtaaaggaatgtgtaatattcattccggcgcgacctggagcggccagtctaactcaccgtttatgccgttcgattgctcgcaaatcatctggaatgacgcgcctgcgctaccgctgccggaatcagacctggtgaataaagcgatggcgctaagccaggcggtaaatcgtcagctccatccaaaacccgaagacgactcgcgcgtaagcgcatctttacgctccgcgatccaaaaatcgggcatggtattattagatgactttggcgatattgttctgaaaaccgctgatttgtgcgcggcggaagacgagtgcgtgcgtctgaaaaatgcgctggttaatctcggtaacagtaaggactggaacgcgctggtgaaacgcgcgaacgccggcaaactggacggcgtcaacgtgctgctacgccccgtaagcgcagagtcgctggaaaatctggtcacgacctcaacggcgccgtttatttctcgcgagaccgcgcgtgccgcccagtcgctgaatagccccgctcccggcggattcctgatcgccagcgatgaaggcagcgaactggttgatcagacctggccgtcaacgccgctgtatgactatcccgcgcaggaacagtggagcgccttccagcgtctggcgcaaacgctcatgcagacgccatttagcgccgagggcattgtcaccagcgtgtataccgatgccaacggcacgcagcatatcagcctgcatcgtatccccgataaatccggctggtggcgttacctcggcaccacgctgctgatgctggcaatgatagtgagcgcggtctacaacggcattcaggcgttcaggcgttatcaacgccaccgtacccgtatggcggacatccaggaatactatgaaagctgcctcaatcccaggttaaccgtctctccggaaaatctcatctgatagcgccgccgtgcgacagggtatgctaccctgtcgcgcaaattgcgttaccctggagttccccatgcatattgatattgactggcaaaacgtggataccgttttgctggatatggacggcacgctgctcgatctcgcgttcgataactatttctggcaaaagctggtaccggaaacctacggcgcgcagcagggtatttcgccgcaggacgcgcaggaatatattcgccagcagtatcatgccgtacagcatacgctaaactggtactgtctggattactggagcgagcgtctgggtctggatatttgcgccatgacgacggcgcaagggccgcgcgccgttttgcgcgacgataccgtaccgtttctgaatgcgttaaaagccagcggaaaacgtcggattctgctcaccaatgcgcatccacataacctggcggtgaagctggagcataccggtctggcctcacaccttgatttattactttccacccacacatttggttatcccaaagaggatcagcggttatggcgcgctgtcactgaggaaacgggaataagcgcagagaaaacgctgtttatcgatgacagcgaaccgattctcgacgccgccgcccggtttggtattcgctactgtcttggcgtgacgaatcctgattccggcctggcggaaaagcactatacgcgccatccgtccctgaacgactaccgccgtctgatcccctcgctgatgtgaaggagacgccatgaaagaaaagtcctccgttgaggtcagactggataaatggctgtgggccgcgcgtttttataaaacccgcgcgatggcccgcgagatgattgaaggcggtaaggtgcattacaacggccagcgcagtaagccgagcaaaatcgtcgagctgaacgcaacccttaccctgcgtcagggaaatgacgaacggacggtgatcgttaaagccatcaccgaacagcgccgtccggccagcgaagccgtcgctctgtatgaagagacggcggaaagcgtggaaaaacgcgaaaaaatggcgcaggcgcgcaagcttaacgccctgaccatgccgcatccggacaggcgaccggacaagaaagagcgccgcgacctgttacgatttaaacacggcgacagcgaataactgtcacccgcaagagagatgattatgccgcaacatgaccaattacatcgttatctgtttgaaaactttgccgttcgcggcgagctggtaaccgtttcggaaaccttgcaacagatcctcgacaatcataactatccgcagccggtgaaaaccgtactggccgaactgctggtcgccactagcctactgaccgcgacgctgaagtttgctggtgacattacggtacagctccagggcgacgggccgttaagcctggcggtgatcaatggcaataatcagcagcagatgcgcggcgtagctcgcgttcagggcgatatccctgacaatgcggatctcaaaacgctggttggcaacggctatctggtgatcaccattacgccggaagagggtgaacgctatcagggcgtggtgggtctggaaggcgatactctggcggcgtgcctggaagattacttcctgcgctccgagcagttgccgacgcgcctgtttatccgtaccggcgatgtcgacggtaaaccggcggcaggtggaatgttgcttcaggtgatgccggcacagaacgcgcaggcggaggatttcgaccatctgactatgttgacggaaaccattaaaagcgaagagctgctgacgttaccggcaaatgacgtgctgtggcgtttgtatcacgaagaagaagtcacgctctacgatccgcaaaatgttgaattcaaatgcacctgttcacgcgaacgttgcgcgggcgcgctgaaaacattgccggatgaagaagtggacagcattctggcggaagaaggcgaaatcgatatgcactgcgattactgcggcaatcattacctgttcaatgcgatggatatcgcggagatccgtaacaacgcctctcctgccgatccacaggttcattaatcgcctttcagtcgacaacatcattgcctgatggcgctcgcttatctggcctacagcatcccgctccgtaggccggataaggcatttatgccgccatccggcaaaaagcttactcgttgtagtaatccacatccaaccgctgaccatcaacaatgatatcgcgccaggctttgggggctgagtctaaccgatgcccggcaatcgcgtgcaacagttgcgtcttagaaaacccgtccggcagtcgggcgaacgctttctgcgtccatttcccctcttttaagccgtagacctggctctcggcaacaataaagttatacagcacctgctcaggctgaccgtcgccgttaagatcctgactcaccagcacgcaggcatccggttcaaggcaggaatcgtccgaataactctgctctttgacaaacgcccaaaatgcggcatccggcttctggctaccgggcgcaatcatcaccacccgcgctaaatcgtccgccgtcggagagaccttatttctctgcaaaaacgtcatcagttcacgattgcgctttctgttctgcgtaaacgcctcgtcatcccgcaacgatttcagcgcttcctggccaggtttgccgctgtgatccagcatatacaggctgatctgatccgcagtaattttaccactatggtaacgcgccatatggctgttgacgctaatacgccagacatcaagtacaggcgaggccagcaacagcaatatcaccagcgtcaacaaagagacgctcagtatcaccttgccttgccactcaccagggtcgcgtccgcggcgtaacagaccgatcagataaccgaaggaccataccagcaagacagacaccgtcagcgcaccatacagacgatccggcgtccaaccgtattgctgaatgcgtacccataacgcccagcccgccagcagcatatatatcggggcaacgcacagcgaggcgctaatcatgccgcgtagtacgcgcggatagggtaatacgcgcttttgcggttcgttgacaatcgccacgaggagcagcagcatcagcgtcagcgtggatagcagccccgcagcggaaacacgcgcagaaatcgcctccagtccggtaaagggtaacgtcacaataaacagcaatgccagcagcgacaccactggcagtaaacccgtcgcgatcagcgtcagcagcttttgcaccgccgccacaaggcgcgactgcgtgcgggcgagaatgaccgccagcgccgtaatcaggccgatggtcacataaataaaggcttcagtttcaaagaaaagggtgctgaaaaagcggatgcccaccagcctgaatagcgcgctccagagcagaagcaccagccagaacagtccgttagcgaccaggacgataaacaatgtcagtacgttatgccataaccgcagataaaactggggataacgcgccgaaccggtttgcgaatgtaactgatattgcatccagggtaagaccagcatcgccatcaacacaagccggagaccatacagccagaggagctcggccaggcgccatttctccaccgtctcaacctgccatttcagccagccgctcattgccagcacgaccacaaagatcagccccagccagccccacagcgcgcgctgtttaaaagagaccacggtaagcaatagcattgacgacaacgctatcgtcgcaggcataccatagaacagccagtcgctattttgtggtaccagccaggccatcagcaggtagcacaagacgccctgcagcaaaccggtgagcaacatcccccagcgagtagtatgtgaaagcgctacactttccatgtcgttatccagaatgatgagaaagccgcattattgcaccatctgttcaccgccaggcgtcgtcatgcataattcagaaaaaaacgcagagaggtgaatcgatattgttaatgttggtgttacgtaactttcttacatgaatgcgattacagtcacattatgtcggtcaaaaacacttccttttaacgttttcagaacattttccacaacaaaagtaggtttcctgccataataaccgccgctgcgtgacaggagtcacagtgtttttcgtcaatcgtgattttgtccagatacgtaaatctatgagccttgtcgcggttaaccaacctcaaaaaaccttactattttcggtaatatatattggctaaggagcagtgatatgcgcgttaacaatttaaccccgcaagatctcaaggcttatggtatcaacgacgtccaggatatcgtttacaatcccagctacgacaccctttatcaggaagaacttaatcctggtctggaaggctatgagcgtggcgtgttaactaacctgggcgctgttgccgttgataccggtatttttaccggtcgttcgcctaaggataagtatattgttcgcgacgacaccacgcgtgatacgctgtggtggtccgataagggtaaaggtaaaaacgataataagccgctttcccaggaaacctggcaacacctgaaaggtctggtgacgcatcagctttctggtaaacgcttattcattgttgatgcgttctgcggcgcaaatgccgatacgcgtctttccgtgcgctttattacggaagtcgcctggcaggcccacttcgttaaaaatatgttcattcgcccaacggacgaagagctggtaggcttcaaacctgactttattgtcatgaacggcgcgaagtgcaccaacccgcagtggaaagagcaagggctgaactcggaaaacttcgtggcgttcaacctgactgaacgtattcagcttattggcggcacctggtacggcggcgaaatgaaaaaagggatgttctcggtaatgaactacctgctgccgctcaaaggtatcgcctcaatgcactgttccgccaacgtgggtgaaaaaggcgatgtcgcggtcttcttcggcctttccggtaccggaaaaaccactctctccaccgacccgaaacgtcgtctgattggcgatgatgagcacggttgggatgacgacggcgtgttcaattttgaaggcggctgctacgccaaaaccatcaaactgtcgaaagaagcggagccagaaatttatcatgcgattcgccgtgatgcgctgctggaaaacgtcaccgtgcgcgaagacggcaccgttgatttcgacgatggttccaaaaccgaaaacacccgcgtctcttacccgatctatcatatcgataacatcgttaagcccgtgtccaaagcaggtcacgccaccaaggttatcttcctgacggcggacgccttcggcgtgttgccgccggtttcccgtttaaccgctaaccagacgcagtaccacttcctgtcaggtttcaccgctaaactggccggcaccgaacgcggcgtcaccgaaccgacccccaccttctccgcctgcttcggcgccgcgttcctgacgctgcacccaacgcagtatgctgaggtgctggtgaaacgtatgcaggcagcaggcgcgcaggcttatctggttaacaccggctggaatggcaccggcaaacgtatctccatcaaagatacgcgcgcaattatcgacgccattctgaacggttctcttgataacgcggaaaccttccgtctgccgctgttcgatctggcgatcccgactgaactgccaggcgtggatacccacattctcgacccgcgtaacacctacgcgtcgccggaacaatggcaggaaaaagccaccgcgctggcgaaactgttcattgagaacttcgagaagtatacggataccccggcaggcgaagcgctggttagcgccggaccgaagctgtaaggaacaggccggatggcggctttgaacggcgtcatccggcgttgagaagaaagggagggtaatacctccctttcttatgcctcttttgtcgtcccctggacgcgagccacaggaaccggtagccaggcgcgaatcgacaatccgccacgctcgctggtgccaatctccagcatcccgttatggttatcgataatgcgctgcacaatcgccagccccagccctgtgccgctggtgctacgggcgctgtcgccacgcacaaaaggctggaacagatgtttacgctgctccggcttaatgcccggcccgtcatcttctacctgaaaccaggcgcgatgcgactcggtgccgctgctgaccttaatccagccgttgccatagcgggcagcattgaccaccatattcgccaccgcgcgcttaatcgagagcgggtgcattttcacctggatgctgcctgcctgaagcgcagtgttaatctcacgctcatagccgctttccgccgcaatcacctcgcccagcacggaattgagatccgccatctccattggcatttcctgaccggtacgcagatagtcaataaactgttcgataatggcgttacactcttcgatgtctttattgatcgactccgcgagataaccgtcttcctcgcccatcatctccgtcgccagacgaatacgggtcaacggcgtgcgcaagtcgtggctgacgcccgccatcaatagcgtacggtcatcggccaattgcttcacgccggctgccatatggttaaacgcccgggtcacagagcgcacttcagaggcgccatattcacgcagcggcggcggaataattcccttccctacctgcaaggcggcatgttcaagatccactaacggtcgattctgtatacgaataaacagccacgcgccgcctatcgccaggagcatgatcgccagcgtgtaacggaaaagcggagaaaaatcgccctgatgaatctcggtcagcggcacgcgcacccagatattgggcgacagccaggttttgagccacacgacgggcgagcttttgttgacctcaacgcgcacttccgtcgggccgcctaattgctgcgccatctggtggcttaagaattcgtagtgttgcgcccaacgcaacccggcctcttcggcggcttcgttggtgtagagagagatccccagctcgcgatagatttcccggcgaaacgcaggcggcacgactaactgcgtgccgtcctccagttgcagcttatcggtcatcagcatacggacttcgtaagccagaaccttattaaactgctggaggctcggcaaaatcgcgaagttcagcaccaccaggtaggtcgtcaccaggctgacgaacagcaaggtgacgatgagcaacagcgtgcgggcaaatgaacttcgcggtgagaagcgcattcgcctcatgctttagaaccgtccggtacaaagacgtagcccaggccccagacggtctgaatataacgcggatgtgccggatcttcttccaccatacggcgcaggcgggagatctggacgtcgatggagcgttccatcgcggaatactcgcggccacgggccagattcatcagcttatcgcgagagagcggctcgcgcggatggctgactaacgctttcagtaccgcaaactccccgctggtcagcggcatcggttcatcttcacggaacatctcgcgcgtaccgaggttcagtttaaacttaccgaacgcgataacggcctcttcctgcgacggcgcgccgggcagttcgtttgcctgacgacgtaacacggcgcgaatacgcgccaacagctcgcgcgggttaaacggtttaggaatgtagtcatcggcgccgatttccagcccgacgatacggtcaacctcttcacccttcgccgtgaccataatgatcggcattggattactttgactacgcaggcgacgacaaatcgacagaccatcttcacctggcagcattaaatccagtaccatgagatggaaagattcacgggtcagcagacgatccatctgctcagcgttagcgacgcttcgaacctggaagccctgctcggtcagataacgttccagtagcgcccgcagacgcatatcgtcatcaaccaccagaatcttataattctcttgcattgtctgtactcccaaaggttcgcaacaaatgtaagtgtgtattcttaaaaaagctcacgtgagtcaccagcaaattctggtatgaatttcaggctaaattgttacaaagcatatttaacagcagcttaaatatacaattaatcggcaaccccattatttattctgtcgggacgatcacgttataccccgtgtgcgcaatatcgacagcaaaggtaaatcaacgagatgaaaacgcccctgatcacccgcgaagggtacgaaacactcaaacaagagctcaattatctctggcgtgaagagcgcccggaggtcaccaaaaaagtgacctgggctgcgagtctgggcgaccgcagcgagaatgccgactatcagtataataaaaagcgcctgcgtgagatcgacagacgcgtcagatatctgaccaaatgcatggaaaatctcaaaatcgtggattattccccgcagcaggagggcaaagtcttcttcggcgcctgggtggaaattgaaaatgatgacggcgataggctgaagttccgcattgtcggctacgatgaaattttcggacgtaaggattacatctctatcgactcgccgatggcgcgggcgctactgaaaaaagaagtgggcgatctggcggtggtcaacacccctgtcggcgaagcaaactggtacgtcaatgcgatcgaatacgtcaaataagacaagaagaatcctaagcccccgctgatggctggcatttttgccagccaatccgtataactatcccctgatttttatcctgaagacgaagctaacccatgatgaatgattctttctgccgcattattgcgggtgaaatccaggcaaatgccggacaggttgaagctgccgttcgcctgcttgacgaagggaacaccgtgccgtttatcgcacgttatcgtaaagaaatcaccggcggtctggatgacacgcagttgcgtaacctggaaacgcgtctgggctatctgcgtgagctggaagacaggcgtcaggccatcctcaagtccatttccgaacaaggcaaactgaccgatgagctggctggcgccatcaacgctacgttaagtaagaccgagctcgaagacctctacctgccctataaacctaaacgccgcacccgtggacaaatcgccattgaagccggccttgagccgctggccgatctgctctggaacgagccgtcccacgatcctgacgtggaagcggcaaagtacattgatggcgacaaaggcgtggcggacacgaaagccgcgctcgacggcgcacgctacattctgatggagcgctttgccgaagacgccgcattgctggcgaaagtacgtgattacctgtggaagaacgcccatctggtcgccaccgtcgtgagcggcaaagaggaagaaggggcaaaattccgcgactatttcgaccatcatgagcccattgctaacgtcccgtctcaccgtgcgctggccatgttccgtggtcgtaacgaaggcattctgcaactttcgctcaatgccgacccacagtttgatgagccgccgaaagagagctactgcgagcaaatcatcatggaccatctcggcctgcggctaaataacgccccggcggatagctggcgcaaaggcgtagtgagctggacgtggcgtatcaaagtcttaatgcacctcgaaaccgaactgatgggcaccgtgcgcgaacgtgcggaagacgaagcgattaacgtgtttgcgcgtaacctgcacgacctgctgatggcagcccccgcaggcctgcgcgccacgatgggccttgatcctggcctgcgtaccggcgtaaaagtcgctgtcgttgacggcaccggcaagctggtggcgacggataccatttatccgcataccggtcaggcggccaaagcggctaccgtgatcgccgcgctgtgcgaaaaataccacgtcgaactggtcgcgattggcaacggtacggcctcgcgtgaaaccgaacgcttctatctcgacgtacaaaaacagttcccgaacgtgacggcgcagaaagtgatcgtcagcgaagcgggggcgtccgtgtattccgcttctgagctggcggcgcaggagtttccggatctcgacgtctccctgcgcggcgcggtctctatcgcgcgtcgtctacaggatccgctggcggaactggtgaaaatcgatccgaaatccatcggcgtcggccaatatcaacacgatgtcagccagacccagttggcccgtaaactggatgcggtggtcgaagactgcgtaaacgccgtcggcgtcgatttgaataccgcctccgtgccgctgctgacccgcgtcgcgggcttaacgcgcatgatggcgcaaaacatcgtcgcctggcgcgatgagaacggtcagttccagaaccgccagcaactgttgaaggtgagccgtctggggccgaaagcgtttgagcagtgcgcgggcttcctgcgtattaaccacggcgataacccgctggatgcgtccaccgtccacccggaagcctatccggttgtcgaacgcattctggcggcgacgcagcaagcgctaaaagatctgatgggcaacagcaacgaattgcgccacctcaaggccgctgattttaccgacgataaattcggcgtgccgaccgtgagcgatatcatcaaagagctggaaaaaccgggccgcgacccgcgtcctgaatttaaaaccgcgcaattcgccgatggcgttgaaaccatgaacgacctgctaccggggatgattctggaaggggcggtcactaacgtcaccaatttcggcgcgtttgtcgatatcggcgttcatcaggatggcctggtccacatctcttccctgtcgactaagttcgtcgacgatccacacaccgtggtaaaagctggcgacatcgtgaaggtgaaagtgctggaagtggatctgcaacgtaagcgtattgcgctgacgatgcgtctggacgaacagcccggcgaaaccgccgctcgccgcggcggcggcgccgatcgcgctcagggcaaccgcccggcatcaaaagcggcgaaaccgcgcggtcgtgacgcccagccagccggtaacagcgccatgatggacgcgctggcagccgcaatgggaaaaaaacgctaatcgggtaatacgcaggccgggttacttcttatccggcctgcgattttgcaatacgtccaaccctttcttttttaattaacaattaaatcttacccattagaatctgttaattaatttccttctgctatccgcactattaattatcactttattaacagatgaaaccttaattaaacattaaaaacggtgaatatttgcacattagaggtatttgcaaaaagacaaataaatgttgagccatatcaacatcggcgcaaattatcgcttatttgtacattccgtcacattttaatcgttgaagatagaaaccattctcattatcattgtgttgttgattatttactctttccttcgttggctaaacatcgggtctcctgccgcccccctgagcgccgcatgaggtatacatccagttagtaagaaacaagtaggtcgtatgcaattcactcctgacactgcgtggaaaatcaccggctttgcgcgtgaaatcagcccggcgtatcgtcaaaaactgctttcgctcggcatgttgcccggctcttcatttaatgtcgtccgcgtcgcgcccttaggcgatccgatccatatcgaaacacgacgcgtgagtctggttttgcgtaaaaaggatttggcgttaatagaagtggaagcggtttcctgttaatacagtgagtctataaaaatgaaaaaattaaccattggtttaattggtaatcctaattccggcaagaccaccttatttaaccaactcaccggcgcgcgtcagcgcgtggggaactgggcgggcgtcaccgtcgagcgtaaagagggccagttcgcgacaactgaccaccaggtcacgctggtagatttacccggcacctattctctgacgaccatctcgtcacaaacctctctcgacgaacagatcgcctgccactacatcctgagcggcgacgccgacctgttgataaacgttgtggacgcctccaatctggagcgcaacctctatttgacgctgcaactgctggagctgggtattccctgtattgtcgcgctcaacatgctggatatcgccgaaaaacagcaggttcgtattgatgtcgacgctctgtccacgcgtctgggttgccctgtcgtaccgctggtatcgactcgcggtcgcggtatcgaggcgctgaaactggccattgatcgtcacaacgctaacgacaacgtcgaactggtgcattatgctcagccgctgctgcgcgaagcggatttcctggccgacgcgatggcccaggagatgcctttacaacagcgccgctggctgggtctgcaaatgctggagggcgatatctacagccgggcttacgcaggcgaggcggcgcaaaacctggatacctccctggcccgtctgaaggacgaaatggacgacccggcgctgcatatcgccgacgcccgttaccagtgtatcgccgctatttgcgacgtggtcagcaataccctgacagccgaacccagccgcttcaccagggcggtcgataaaattatcctgaaccgcttcctcggcttaccgatttttttgttcgtgatgtacctgatgttcctgctcgccattaacatcggcggcgcgttgcaacccctgtttgatgccggttccgtcgccatctttattcatggcattcaatggattggctacacgctgcacttcccggattggttaaccatcttcctggcgcaaggtcttggcggcgggatcaataccgtcctgccgctggtgccgcaaatcgggatgatgtacctgttcctctccttccttgaagactccggttatatggcgcgcgcggccttcgtcatggatcgcctgatgcaggcgctgggactaccgggtaaatccttcgtgccgctgattgtcggcttcggctgtaatgtaccttccgtgatgggcgcccgcacgcttgacgctccgcgcgaacgcctgatgaccatcatgatggcgccgtttatgtcctgtggcgcgcgcctggcgattttcgccgtctttgccgccgccttcttcgggcaaaacggcgcgctggcggtcttctcgctgtacgtgctgggtattgtcatggcggtattaaccggcctgatgctgaagcataccattatgcgcggcgaagcttctccgtttgtgatggagctgccggtttaccacgtcccgcatatcaagagcctgatcatccagacctggcaacgcctgaaaggttttgtactacgcgccggtaaagtcattatcatcgtgagtattttcctgagcgcgtttaacagtttctcgctgagcggcaaaatcgtcgataacattaatgactccgccctcgcctctgtaagccgggtcatcacgccagtctttaaaccgatcggcgtccatgaggataactggcaagcgaccgtgggtctgtttacgggcgccatggcgaaagaagttgtcgtcggtacgctgaacacgctctacaccgccgaaaatattcaggacgaagcgtttaatcctgccgactttcacctcggcgatgaactgctgggcgcggttgacgatacctggcaaagcctgaaagacacctttagcctgagcgtactggctaatccgatcgaagcaagtaaaggcgacggcgaaatggcgaccggcgcgatgggcgtgatggatcaaaaattcggcagcgccgcggcggcgtacagttacctgattttcgtcctgctttacgtaccgtgtatctcggtaatgggcgctatcgcccgcgagtccagccgcggctggatgggcttctccatcctgtgggggctgaatatcgcctattcgctcgccacgctgttctaccaggttaccagcttcagtcaacacccgacatacagcctgatctgtattctggcagtgatcgtctttaacgttgtggtgttaagcctgttacgccgcgcccgcagccgtgtagacattgaactgctggcaacccgcaaaaacgtcagttcctgttgttcgggcactgcgggcaattgtcactaagggatgtaaaaaatggcttcattgatacaggttcgcgatctactggcgctgcgggggcgtatggaggcaacgcaaatcagccatacgctgcacgctccgcagcccatgatcgacgccatgctgaatcaactggagatcatgggtaaagcggtacgtatcccggaagaaccggacggctgcctttcaggcagctgtaaaagttgtccggaaggtaaagcctgcctgcgcgaatggtgggccttgcgttaaccttcgtcgggtagcgacgtaacgcgtcttatccggcctttatcccgcgttatgttgcccggtacgcgtcacgctgccgggcaattttgcgtcatgccttccacaaagatgaaagcgttaccgccgtgcgcatttatctccccacgcgcctcgcaagcgcactaatcctctactgcaatcagcccggtctgcgcgtagtgtcacgccattgaacttcaccgatgacggatcgatatggcgacctcaacaacatccacgccgcatgacgcggtattcaaacagtttttatgccaccccgatactgcacgggattttttggaaatccatctcccgtcgacattacgtcaaatctgtaatctgaatacgttacggctggagtccggtagctttattgaagaggatttacgcccccattattccgatattctttggtcgctggaaacaagtgaaggtgaaggttacatttacgtggttattgaacatcagagtacgccggacgcgcatatggcatttcggctgatgcgttacgcaatggctgcaatgcaacggcacctggaggccgggcataagacgttgccgttagtggtgccaatgctgttttatcacggaaaccgcagcccgtatccgttctcattatgctggctggatgaatttgccgacccggtgatggcgcgtaagctatacgccaccgcctttcctctggtcgatattacggtcgtgccggacgacgagattatgcgacaccgacgggtcgcgctgctggaactcatacaaaaacacatccgccagcgtgatctgatggggcttgtcgaacagctggtcgccctgctggttaagggatacgctaatgacacccagcttcaaagtttgtttaattacatgatgcacactggcgacgccgcgcgcttcaatacgtttatccgccaggtggctatgcgtatcccacagcataaggagaagatcatgactatcgcagacagattacgtcaggaaggacatcgtaacgggttacagcaaggcaagcaggaaggccaacggctcgccgcattgcgcattgcccgctccatgctaaacgatggtttcgatcgcgataccgtgcttagggttaccgggctggcgcctgccgatctggcgtctgaaaaccattaatctggcagaatggtccgggcccggcaacgccctggttacagcgatgattttagcgtcatcagcgcctgacaaaacgccgccggatgcgagataaacggcgcatgggccgccttcgccattatctgtgatgtactgtgcggccataacgtatcgagcaaaggcacgattttacgcggcaccagaccgtccagataaccatacaaacgcaaaaacggcatgttcacatttttaagcgcttctcgtagatcgaccgtttttaagatttccagtccgccattgagcacctctacatccggcataggctgcgccagcaccacgctttttaaggtgcgggcatcctgacgcgccgtctccgtccctaacgtttgcagcgccagaaaacgctccaccgtgcgctgaaaatcgtcgctaagctgctgctggaatccgccgaggatttctggttttattcccggccacccctcacgcgcgctaaagcatggcgaagaggcgacagtcaccagcgcctggacgcgttcagggtgggtgagcgccatctgactcgccaccaggccacccaggctccagccaagccagatagcctggtccggcgcgtttttcgctacctgcgccgtcatctcttcaagcgtcatggcgccaaaccccgagctgcgaccatagcccggcaagtcgaccagatgcagcgtaaaatgcgagccgagttcctcgcgaatgcaatgccatacctccgcgttcaatccccatccgtgcagcagcacaagatgacaatttccctcgccgtaggtctgccaccagatgtcattcatcagttactgttctcttttgtctaacaaggatgcacctatgctaacagtaccgggattatgctggctatgccgaatgccgttggcgttaagccactgggggatttgttccgtatgcgcgcgcgctgttcgtcagcgcgtcagcctgtgtccgcaatgcggattacctgccgcgcatccttcgctcccctgcggtcgctgcctgcaaaaacctccgccctggcagcgtctggtgagcgtcagtgactatacaccgcccttgagtttactggtgcatcagcttaaatttacccgccgcagcgaaattgccgccgcactggcgcgtctactgttgcaggaagtcctcatggcgcgccgcagcactggcttgcagcttcccgacagaatcgtcagcgttccgctctggtcgcgccgacactggcggcggggatttaaccaaagcgatctgttatgccaaccgttagcgcactggctgggctgcgcgtgggacagccagaccatcacgcgggtacgggcgaccgcaacacaacatcatctcagcgccaggttacgtaagcgcaatttgaaaaacgcgtttcgccttgaattgccggtacagggtctccatatggttattgtggatgatgtcgtcactaccggaagtaccgtcgcggaaatcgcgcaactgcttttgcgcaacggcgcagcgactgtccaggtatggtgcctgtgtcgaaccttgtagagcctcgatgatgggcgtattataaccaactaaaatagtcaactattaggccattactatgatccgtatttccgatgctgcacaagcgcactttgccaaactgctggcaaatcaggaagaagggacgcaaatccgcgtatttgtcattaatcccggcactcctaacgcagagtgcggcgtttcttattgtccgcccgacgccgtagaagccaccgatactgcactgaaatttgacctgttgaccgcttatgtcgacgagctgagcgcgccctatctggaagacgcggaaattgatttcgtgaccgaccagctaggttctcaactcacattgaaagcgccaaacgcgaagatgcgcaaagtggccgatgacgcgccgctgatggagcgcgtggaatatgctctgcaatcgcagattaacccgcagttggcgggccacggcggtcgcgtctcgctgatggaaattaccgatgaaggctatgcaattctgcagtttggcggcggttgtaacggttgctcgatggttgacgtcacgctgaaagaagggatcgagaaacagttgctgaatgaattcccggaactgaaaggggttcgcgatctgaccgaacaccagcgcggcgagcactcatactactaagattttccccgcatccatgcccgatggcgcttgcgcctgtcgggccttgtcagccccaccgtaggccgaataaggcgtctacgccgccatccggcgctatcaaccacatctcataacaatggcccttcttctttcgccgataacatgacctgtgtctcataatttaaattttgcctgccagggtcattttcaacacccatatgttacccgtatcattcttatgggcacctaacatccatataacatctgactacgctcattcgtttcaacggtaatcagtattggtgctattgcgactctgttcccgtcgggaacaacaggaatttgtcgtcgaaacaatgacgttacccataacaaagtaaaggccaggtaaatcatgccattagtcatcgttgctatcggtgttatcttgttacttcttctgatgatccgcttcaaaatgaacggatttatcgcccttgtcctggtagcgctcgctgtcgggttgatgcagggaatgcctctggataaagtcatcggctccatcaaagccggtgtcggtggtacgcttggcagtctggccctgattatggggttcggcgccatgctgggcaaaatgcttgccgactgcggcggcgctcaacgtatcgccactaccctgatcgcgaaatttggtaaaaagcatattcagtgggccgtagtgttaaccggctttaccgtcggcttcgctctgttctatgaagtgggcttcgttctgatgctgccgctggtattcaccattgccgcagcggcgaatatcccgttactgtacgtcggcgtgccgatggccgcggcgctctccgtcacacacggcttcctgccgccgcacccgggtccaaccgcaatcgccacgattttccatgccgatatgggtaagacgctgctgtttggtacgattctggcgatcccgaccgtgatccttgccggaccggtttacgcccgtttcctgaaaggcatcgataagccgatcccagaaggcctgtacagcgcgaaaacttttacggaagaagagatgccgggctttggcgtcagcgtctggacgtcgctggttccggttattctgatggcgatgcgtgcgattgccgagatgattctgccaaaaggccacgctttcctgcccgttgccgagttcctgggcgacccggtaatggctacgttaattgccgtactgattgcgatgttcacctttggcctgaaccgcgggcgttccatggatcagattaacgatacgctggtctcttccatcaaaattatcgccatgatgctgctgatcatcggcggcggcggcgcattcaagcaggtgctggtcgatagcggcgtggataaatacatcgcttcaatgatgcatgaaaccaatgtctctccgctgttgatggcgtggtctatcgcggcggttctgcgtatcgcgctgggctctgcgactgtcgcggcgattaccgcaggcggcattgcggcgccgctgatcgccactaccggcgttagccctgaactgatggttatcgcggtcggttccgggagcgtgattttctctcacgtcaacgacccgggcttctggctgttcaaagagtatttcaatttgactatcggcgagaccattaaatcctggtcgatgctggaaacgatcatctccgtctgcggcctgatcggctgtctgctgttgggtatggtggtttaagcgaggcggcttgtaggccggataaggcagcaatgtgcgccaggattgcctgatggcgctgcgcttatcaggcctacgtgctctcaacataataaagccggggaaatccccggctttattatttcttcttcgcggccgcttttcggcgtttatccaaatccttaatcagcttgtttacgccctcatcggcaaacatctgctccagcgtggcagtgagcttccgtcgccagtttttatactgatcgctggtgcccggtacgttaaccggatcggccatatccagccagtcctccggctgaagccccaacagaccgctgttactgtcggctatgtagcgctgaagcccgcgatttagcgttggcgtcatcgacattaacgatgccttatgcccggcgcgttttggcagacaaccatatttatgcagcgcgtccaatagcccctgtttcgcccgctcgcgatcctcatacagcccgcgcagaatcacttcatccggataaagccccaaagctttacccaacgtcaggtcaccgcattcccaatagccgcgcagcgtggggagatcgtgcgtcgaggcgacagccatcgattgttgcggatatgcgcccggcgcgcggaagtttttctcaaggtcattttcaaaccacagcactttataagaatagaccccgctatcgcgcagcttgccgacaatctcaactggcaccgtccccagatcttcgcctatcaccatacagcggtgacgttggctctccagcgccagaatagaaagcaaatcatctaccggataatggacgtaagccccctgatccgctgtttcgccatacggtatccaccacaggcgcagcaacgacatgacatggtcaatgcgcaacgcgccgcagttttgcatattggcgcgcagcaggtcgataaagggctcatacgcccgggcgacaatgatatgcgggtccatcggcggcagcccccagttctgaccgagcgggccgaggatatccggcggcgcgccgacagatgctttcaggcagtacagctcccggtcgcaccaggtttccgcgccgccttccgctacgccaaccgccagatcgcggtacagaccaatcggtagtttaaaactctggcaggtatcccagcaggcggcgaattggcgccaggccagccactgaagccagaggtaaaactccacctcttcgcggtgcgcttcacagaattgttttaccgcgggatactctaccgactggtacgcctccggccaggctggccagccccagcgctgctcatcctcttttacctgatacgcatgcagcgcgtcgaatgccgcctgccagtaaaggctctcgccttcgcgggcgataaagtgacgaaactccgccatttgcgcatcgtcgcgagcggcaaaccgcgtccacgccatccgcagcgccgtgattttcagcgcggtaacggtagcgtaatccacccattgcgcatcgcgcgcctgtcgcagcttttgctgtgtggcgggcatttgccaccatgcctgcgcctcttcgctcaggcggaaatcttcgacggcgttgacgtcgatatatatcacgttcagccagcgacgagacgaggggctgtagggactggcgctctccggattcgccggataaagcgcgtggatcggattcaggccgataaacgcgccgccgcgtgtcgccacgtcgaccagcatcgacttcaaatcgccgaaatcgccaataccccagtttttttctgaacgcagagtataaagctggacgcaggccccccacagttttttcccttccagcagcgcctgcggctcatagcatcgcggcggggcgacgataatacggcagtgcgtacgctgttcatcctgggtcaacgtcagggtgtggtagccctccggcaatgtagccggaaggttaagttttttaccgcccgtcacgcgccctttgtaatgcacgccctcttccgtagtcagcagccaggcaaactcaccgcgcccctctaccggcaacgccatttttttacccgcggtataaaccttcacattcggcacgaccgcctgtggtcctgttgtcgtgccgtgcatcgccgccagcaaacgtctcttggtttcagcgccaatagactgcggtttgccatgagcattgatgtaactggggctgatccccgccgccagcgcggcactatcgagacgtttattttccatcgcgctcccttagcgttttgcctgccagatacgggcctgataatcgcgaatagagcgatcggaactgaacataccgcagcgcgcggtattgaggatcgcggcgcgcgtccacgcttcctggtcacgatacagcgcatccacctgcttttgcgcctcgacataagcggcgaagtccgccatgaccaggtacggatcgcccccctgtttgccgaggctatgcagcatctggtcaaaggcatgtttatcgccatcgctgtattgaccgctttccagctcttttagcaccgcatccagcactttgtcttttttacgccatttcaccggatcgtagcctttggctttgagcgccttgacctcttccacagtatggccaaagataaagatattctcttcacccaccttctcagcgatttcaacgttagcgccgtccagcgttcccacagtcaacgccccgttcagcgccagtttcatgttgccggtgccggacgcctctttcccggcggtagaaatttgctcggaaatatccgccgccggaatgagcatttccgccgccgagacgcagtaatccggcaggaaaaccaccttcagcttatcacccaccgccgggtcgttattaatggcttccgcaaccttattgatagcaaaaatgatgttcttcgccaggtaatagcccggcgccgccttcgcgccaaacaggaatacgcgcggtacgcgatcagcctgcgggttttcgcggatctctttgtacagcgccagaatatgcaacagattcagatgctgacgcttgtactcgtgcaggcgtttgatctgaatatcaaaaatcgcgttgcttgaaatctcaatcccggtacgggccttgatgaatttcaccagccgttctttgttcgcccgtttgatgtcgcgatactgctgacggaatttggcgtcgtcagcgtatttttcgaggttgatcaactggtcgagatcgttagcccactcttttttcagcgttttatccagcaacgccgcaagctgcggattgcactgtttaatccagcgacgcggtgtaatgccgttggtgacattgtggaatttgttcggccaaagctggtgatattccgggaacagatctttcaccaccagatcggagtgcagcgccgccacaccgttcaccgcaaagccgctgaccacgcacatattggccatgcgcacctgacggtcatgcactaccgccagttttgcccatacctgcttatcgccaggccaggtgttatcgaccagcgtcttaaagcgatcgttaatctgcttgataatctgcatatgacgcggcaacagcgctttcaccagcttctcatcccagcactccagcgcttctggcatcagggtgtggttggtgtaggcgaaggttttgctggtgatagcccaggcgtcatcccagctcagttggtgctcgtcaatcagcacgcgcagcagttccggaatggcgatggtcgggtgagtatcgttcaattgaatgacctcgtaatccgccagctcatgcagtttgcgtccggccagatgatggcgacgcagaatatccgctaccgagcaggcgcactggaagtattgctgcatcaggcgcagttttttgcccgccgtgtggttatcgttgggataaagcaccttcgtcagtttttccgcatcgataccctgctgttccgcccgcaggaaagcgccgtcgttgaatttggtcagatcaaacggatgcgcgtgggtcgcctgccacaaacgcagcggttgcgcgacgccgttacgatagcctaacaccggcagatcccaggcctggcctgtaatcacaaaacctggctcccagcgcccttctttggtgactttaccgccgatcccaacctggacgtccagcgcctcgttgtggcggaaccacggatagctgccgcgatgccagtcatccggcgcttccatctgcttgccctcaacaaatgactgacggaacagcccatactggtagttcagaccatagcccgtagcggactgcccgacggtggccatcgaatcgaggaagcaggcggccagacgtcccagaccaccgttgccgagcgccggatcgacttcctcttccagcagatcggtcagattaatatcgtgcgctttcagtacatcgctaacgtcctggtaccatcccagatttaacaggttatttcccgtcaggcggccaatcaaaaattccatcgaaatgtagttcacatgacgctggcctttcgtcggctgcgctaccggttgcgcgctcagtaattccgccagcgcgccgctaacggcctgccaccactgacgaggcgtcatgtcggacgccgacagtaaaccgaaacgctgccactgacgcgtcagggcggcctggaattgatctttattgaaggttggctgtgacataggaaatccgtcctcgggtaataaaacaacgttatcgctagtttgccaggctcgatgttgaccttcctcctcccggcaatgattagggagggaggaggagcggggatgagcataaaagtgtgatcgccgccacttacccctgtataaacgcgccgattcctgtcaacgacacccagtgttacgcataatcaaatgaataaacagaaataacagtaaatcgcgaaggggtattttcgaagattatatgaacgccgaaatagtttcttacctgaaatattcagcagcgggaggttcactaacttaacataattaattaaacgcctggtatcgccattgtgttaaatccggatgatgtccaggacattatttacaataacggaaatatgacctcagcccagctctgacgctcgtttcaaccgcgccgaatacttttttaataccgttatttagaattgtgacagagtgcaaattcagacacataaaaagtctgcttagcttgcattaaaatgctttctggccgaccttatatctattaattacgaagcgcaaaaaaaatcgcagttccccccatttcccacagtgaagtgattgctatgttgattccgtctaaattaagtcgtccggttcgtctcgaccataccgtggttcgtgagcggctgttggctaaactttccggcgcgaacaatttcaggctcgccctggtaaccagtcctgctggctatgggaaaaccacgcttgtctcacagtgggcggcgggcaaaaatgaattaggctggtactctctcgacgaaggcgataaccagcaagagcgattcgccagttacttaattgccgctatccaacaggccactggcggacactgctcgaccagcgaagcgatggcgcaaaaacgtcagtacgccagcctgacgtctctcttcgcacagctctttattgaactggcgcagtggcatcgcccgctttatctggtgattgacgactaccatttgattaccaatccggtgattcacgacgcgatgcgctttttcttacggcatcagccggaaaatttcaccctggtggtattatcgcgtaatttgccgcaactgggcatcgctaacctgcgcgtgcgcgatcagctgttggaaatcggcagccagcagttggcttttaaccatcaggaagcaaagcaattttttgaccgtcgtctttcgtcgcccattgaagccgctgagagcagccgcatgtgcgacgatgtggcaggttgggccactgcgctacagttgatcgccctctccgcgcgccagaaccatacctctgcgcatcactccgcccgccgtcttgccgggattaatgccagccacctttctgattatctggtggacgaagtactggataacgtggatgtcagcacccgacattttttacttaaaagcgcgatcttacgctcaatgaatgacgcgttgattgtgcgcgtgaccggcgaagaaaacggccagatgcggctggaggagattgagcgccaggggttattcctgcaacgcatggacgacacgggcgaatggttcagctatcacccgttgtttggtagctttctgcgccagcgttgccagtgggaactggcggcggaactgccggagatccaccgtgcggccgcggaaagctggatggaacaaggttttcccagcgaagctatacatcatgcgctggcggcgggtgacgcgcaaatgctgcgcgatatcctgcttaaccatgcgtgggggctgtttaatcacagtgaactggcgctgctggaagagtcattaaaagcgctgccgtgggaaagcctgctggaaaatccgcggctggtgttgttacaggcctggctgatgcaaagccaacaccgctacagcgaagtgaatacgctgctggcgcgcgccgagcaagagatcaaaggggtcatggacggcacactgcatgctgaatttaacgcgctgcgcgcccaggtcgccatcaacgacggcaatccggaagaggctgagcggctggcgaaactggcgctggatgagcttcctctcgcctggttttatagccgtattgtcgcgacctccgttcacggtgaagtgctgcactgtaaaggcgatctcagccagtctttatcgctgatgcagcaaaccgaacaaatggcgcgtcatcatgacgtctggcattacgcgctgtggagcttaattcaacaaagcgaaattcagttcgcccagggattcctgcaggccgcatgggaaacgcaggagagagccttccagttgatcaaagagcaacatctggaacaactgccgatgcatgagtttctggtacgtatccgcgcgcaattgctgtgggcgtgggcgcgccttgacgaagcggaggcctcggcgcgcagcggtatcgctgtgctgtccaccttccagccgcaacaacagttgcagtgcctgacgttactggtgcagtgctcgctggcgcgcggcgatctggataatgcccgtagtcagcttaaccgactggaaaatttattaggcaatggccgttatcactgcgactggatctctaacgccgataaggtgcgtgtcatttactggcagttaaccggcgacaaaaaatccgccgccaactggttacgtcatacgcccaaaccggcgtttgccaataaccattttctgcaagggcaatggcggaatatcgcccgcgcgcagatcctgctgggcgaattcgagcctgcggaaatcgtgctggaagagttaaatgagaatgcccgtagcctgcgcttaatgagcgatttaaactgcaatctgctgttactcaatcagctttactggcaatccgggcggaaaaacgacgcccagcgcgtattgcttgatgccttacagctcgccaaccgcaccggatttatcagccattttgtgattgaaggcgaagccatggcgcaacaattgcgtcagcttatccagctcaatacgctgccggagatggagcagcatcgcgcgcagcgcatcctgcgagagattaaccaacatcaccgacataaattcgcccattttgacgaaggcttcgtcgagcgcctgcttaaccatccggatgtcccggagcttattcgcaccagcccgctcacccagcgtgaatggcaggtgttagggcttatctattccggttacagcaacgaacagattgccggcgaactggcggtggccgcgaccaccattaagacgcatatccgcaacctctaccagaaactcggcgtcgcgcaccgtcaggacgcggtacagcacgcgcagcagttgctgaagatgatggggtacggggtttgaggcaaaacaggcaacgtcctggtgtgtaaatttgtttaatcataaaacctgaaagcaccggttaacatatgggcaaaaacggcgcttttaaaataaatcggcatgcgttcctgttcgttcaaatcgcaggcattcatccgttatcttataaataagaatccagtcaggctcaatatgggcatcccggtatccgctatatgaaccttgtaacgggtgatctttataaatggcaggaaggggaaaagggtggtgaatcagaagcgtcataagtgttttaagtttgccgacatccttatgacgcttttgtgcccgttttacatctttctggaactgtcccgaatattcaatttccctttgccccatagtcagatccctaactggtcaaacaaatcatcagcatctttggctttatgaatatcaacgccagcttcgctattttctatcgttcgggacgttaactcattgggtatgcgcaaatcaaaaggcaatgccttttcacgcgcaactttagtcagtgtaatccgtatcaaatcagaaatggttaaccccatttcagccaggacatctgccgcctggtccttcagcgtttcgtcgatacgggcacgaacaagcgcatttgcagccatcgattagtctcctgtactgtgtctctatacagttcaaattgtagctcaactgagacacacatacaaaccgggcccggatgtttgccttgcaatgctcgtaaagatgacttagtcgcttacccggacaagatagccactttcggttgcttcacaggaaaatctgaccggcaaaaaccgttccaccaccgcaatattggtaagcaagtgagcggaggcccgtgccacggtaaacgcgccctcgcccgccagcgccagcggtaaaatcagctggtcggccagatgctctcccaccgccgccgggcttgcgagatagcgccgcgcttcatgcgcaacctggttagctaccgcttccgcgctggtgccttttacgccgaacgcggcgaacagttcggtcagttgttcgctttgaatcatcagcgacagcgcgttgcccggcccgcagccgccttccagcgcaacgacgtttttctccgcctgcgggaagtgggcttccagcgttgcgacttcacgttcgccaacgtggtaaggaaccgccgccagcaaagcttcagcggtggtgcgcagcgtctcgccgcgcgatatcagcgtcagaccgcgtaaagacgctgccggttcgacgaccgttgccgccgcgccgccgcctgccggataaaagccgtgttttatcagcgtggtgcgctggctgatgcccatcctcgccaacagcggttcccagacgcggcagataaaatcagcgctgggcgcggcctgattatgcgtcccgccgtgaacctccacgcgggatgaaccgtcagcaaaccacagcgcgggcaggacggtttgcagcaccagcatacaactgcccgcgctgccaatcgcaaaacggtactcgccgccgcgaatcggccccggcgtaaaacgcaactgttgcgagcccagctcgtcgccgttcacctgcgcgccgcagatttccgttgccgctcgcaccgccgttaaatgctggcgtagcagccccggtttagcgcgcccggcgcggatgccgctcatttcaaacggctggccggttatcattgataaactcagcgccgagcgcaaaatctgcccgccgccctctccctgtgcgccatccagcgcgatgatccttgccattttctatcctttaacgcacaccacctgccgcagggcgtacatgatttcaaccaggtcggactgcgccgccatcaccgcatcaatatctttatacgccattgggatctcgtcgatcacgtccgcatctttacggcattcgacatgcgcggtggcacgaatttgatcgtcaacgctaaacagtttcttcgctttcgttcggctcatcacacgtccggcgccgtggctgcacgaacagaacgactcttcgttacccagcccgcgcacgataaagcttttcgcccccatcgaaccgggaatgataccgaactcaccgcgccgcgccgaaacagcccctttacgcgtcacatagatctcttcgccaaagtgctgctctttttgcacatagttatggtggcagttgatctcgtccatatcgagggcgatcggtttttccacgcagcgctggagcgccgccagcgcgttttccatcatcgcctcgcggttcaggctggcgaattgttgtgcccagtgtaccgctttcaggtaatcgtcaaaatattcgcttccttcattaaaatacgccagatcgcgggacggcagcgtttctaactgctcctgcatttcttgctgcgccaggccgataaaataggtgccgatggcgttaccgatcccgcgcgaaccggagtgcagcatgatccatacccgatcggtttcatccagacagatctcaataaagtggttaccggttcccaacgttcccaggtgcttatagttattggtattcaaaaagcgcggatatttttgcgttaaccactgatatcccgcttccagttgcgcccatttttcattaacgttggcgggcgggtttccccatgcgcccacatcgcgatgcccgcgtccggtggtacgcccgtgaggcacagcggcctctatggcgctacgcagatccgccagattttccggcagatcggccgccgttaagctggtacgcagcgcgttcattccacaaccgatatccacgcccaccgccgccggaataatcgcccctttcgtcgggatcacgctaccgatggtcgatcctttccccaaatgcacatccggcataacggcaatatgtttgaaaataaacggcattttcgccgtattgatcagctgctgacgggcatcgtcttctaccggtacgcctttggtccacatttttaccggtgcgttctgggtggtcattaattcgtaattcatcatttttttctcgttttaatcattagggtggcgacaagtttatgtgaatacaccgctctaccattgagctacagagccgggctctgacgggtctcgaacccgcaacaaatgtagatccacaggcattcgccaaaatagggtggcacgacaagttaaggtgaatcacccgctctaccgttgagctacagggctaagccccggcagggttcgaacctgcgtctggccatacaaggtgtagatccaccagcatttgtgccttcagcgttgcgcgacaaattcatagccgggatgatacgcatcgggaaagatgtaatcccggccagcattcgcgccgcgctgaatactctttacaacgtcacggcttcaatctcttccagccagtgcgcgctgccatagtgaccgttaacaaagttatctatcaccgtaaacacctcgtcgctgaagccgccgacgttcaaaatatcgcttcgttccgccgcctgggtggtgccgtaaggcagcagatcgatacacaccaggcgcgcctgcgggttgcgctttttcagttcgatccagcattccatggtggccgttgagccatggcgcgatttatcaacccacgattcgttatccgacaccataatcaccagatccacccgcgcccgctcgttcaacaacctacgcagcggcgcggagcagttggtgccgccgccgccaaccgccgccagcttttgcgcgttgtgcatgaccgactggcgcgcatcaagccgcacgtcgaccacatcgcattcaaacggcagcacgcgggcctgcggatgattacgcagcacggcggcggcgatcagcccggcaacgtccacgcagcggatcttactggtctcccccttgcgatagccggttatcgacgacttcatcgaccccgacacgtccgggcagaccaccacattgccgcgaaacggcggaatgttctccagcgcgtactccatcgcctgcgctaaagcctcgcgaataacctgcggcacgccgctttgcagattgctccacgccgacagcaactgataaggataaacccaggactggcgcacctgcgccctgtccgccagccgctgcgccacgctggcggcaagcgttgcattctcaaacacgtcatgacgcgccagcgtattcaaattcatccgtaacgtttgccaactcatccgctgcgccagttgcgcccactgttcgcgactcagcggcgcgttggtcagtagtaaaaacgacacatcgggtaaggccgcgcccatgtcgccttcacgaaacgccagcagcgcgcgcgttttttccggcagctgcgccttatcgcacggcttaccaatcagccaggcgaagaaggcttcctgccacgccgcctgcggccgtgggtgcaccattttgacgatatccgccagcgacggcgaattgcccaccgatgcctgcaataagcgctcttcgctggcgttctgcaaccaacgctgcaccagcttctttggccgcgtccccagcgagcgccgcccggtcacgccgctgcgcaacatttgcacaaagttacgcagcatccggccattgttgatcacccgcgtaaatactaccggcagcagcgccgaaccacgcgccgccagaatggcggtcaacagcgcgggcatatccttcatcatcccgcgttcgcggccataaatcgccagttgcgctaaaaacagatcgtcgagatctttcgccgtcgccagaacatcatttagctgcgcctggccgctggcataaaaagtctcgttcatgcagccggtcatcaccatttgcgccagtttatggcgcggggtgaaggcaaaggccgctgcgccttgctgattgctggcgttggccagcggcgcgtcccttaacagcgaacggaacaaaagtggattagccatttgtttttcccatttccgttattctccatgccatggttattgcaaccagcgtgccagaaaataaattattttttaatctattgatttttaattgatttatttctttagcgttcaagtgaaagaaaaatgcctgcacggtagtcattaaaaagcgataaaattatctcgtcttttagaaggaaatctaagatgcgaaaaacggtggcctttggttttgtcggtacggtactcgactatgcaggacgcggcagtcaacgttgggaaaaatggcgccctactttgtgtctgtgccagcaggagacgctggtcgttcaccgcctggaactgctgtacgatgcccgctctcgctcgctgtttgaaggattaaagaaggatatcgccagcgtctcgccggaaacggaagtcgtcggcgtagaaatcgcgatccgcaacccgtgggacttcgaagaggtttacgcctgcctgcacgatttcgcccgcagccatacctttcatcccgaagatgaagactatctgattcacatcaccaccggcacccacgtcgcgcagatctgctggttcctgctggcggaggcgcgctatcttccggcgcgattagcgcagacctcgccgccgcgcaaaaaagataaaccgcatagcacgggcgacgtgacgattattgacctcgacctcagccgctacaatgatatcgccacccgcttcgcccaggagcgggaggagacgctcaacttcctgaagtccggcattgcaacccgcaacccgtgtttcaaccggatgattgagcaaattgagcgcgtcgcgatacgctcccgttcgccaatcctgctcaatggcccgaccggcgcgggcaagtcgtttctcgcccgtcgcatctatgaactaaaactggcccgccaccagttcagcggcccgtttgtcgaagtgaactgcgccaccctgcgcggcgacacggcgatgtcggcgctgttcggccacgttaagggggcgtttaccggcgcgagagaggagcgtgcagggctgctgcgcagcgccgacggcggcatgttgtttcttgacgaagtgggagaactgggcgcggatgaacaggccatgttgctgaaagccattgaagaaaaacgcttttaccctttcggcagcgaccagcaggtcagcagcgatttccagttgattgccggcacggtgcgcgacctgcgccagcgggtggcggaggggacattccgcgaagacctgtacgcgcgtattaatctctggaccttcgaactaccgggcctgcgtcagcgccaggaagatattgagccaaaccttgactacgaactggaacgccacgcggcgctaaccggcgacagcgtgcgttttaataccgaagcgcgccgcgcctggctgagcttcgccacctcgccgcaggccgcctggcgcggtaacttccgcgaactctccgccagcgtcacccgcatggcgacgctggcggacaacgggcgaatcacggtcgaaacggtagacgatgaaatcgcgcgtttgcgctatagctggaatgaccatcgcccctccgcgctcgacggactgccgggcattgacgcaacggcgctggatctgtttgaccgtatgcaactggaaaacgtcgttgcggtctgccgccaggcgaaaaccctttccgacgccgggcggcagctattcaacgtttcccgtcaggggaaagccacggtgaatgacgctgaccggctgcgtaagtacctggcgcgttttgggctgacgtgggacgttttacagaattaacacagctccagttgaatatggttctccgtcaacacctgcatcacgcccggcggcggcagggtatcggtgtagaccgcatcgaccatactaatgctgcccatgtttaccatcgcgttacggccaaatttagagtgatccaccaccagcatcacgtggcgcgaattttcgataatcgcgcgcttggtgcgtacctcatggtagtcaaattccagcaacgagccgtcgctatcaataccgctaataccgagaatgccgaaatcgagacggaactgggcgataaagtcctgcgtcgcttcgccaataatgccgccgtcgcggctacggagttcaccgccggcgaggataatacgaaaatcctctttcgccattagcgtgttcgctacgttcaaattgttggtcacgatccgcaaattactgtgccctaacagggcgtgcgctacggcttccggcgtcgtgccgatatcaataaacagcgttgaaccattggggatctgggccgcgactttgcgagcgatgcgctctttttcttccgtttgcgtcgccttacgatcgtgccacggcgtgttcaccgagctggagggcaacgccgcgccgccgtggtggcgcaaaatcatattctgttccgccagatcgttaagatcccgacgaatggtttgcgggctgacagaaaaatgctccaccagctcttccgtactgacgtacccctgtttttttaccagttcaatgatcgcgtcatgccgttgtgtttgtttcatgaataatctctgaaagtaaccaaccttgcgccggatagcggcattcgccctacccggcctggaaaaatatctcgaccacaggccggatacgcctcacgttcgttttcgcgcattcagcgtatcaacaaaggccatcgctaaaccgacgataagcccggcgatgtgcgcgccgttcgccatagacatgccaaaccagtcaaaccaaccagcgactatccacaataatgcaaaaataattaagccgcgctggaggtaaattccgctttgcggatcgcgctctccacgcagccacacgtaacccatcagcgcatagacgacgccagacagtccgccaaaccacgggccgctaaatttctgctgtacatagccgcttagcagcgcgcttatcaccgtaatgacgattaatttaccgctgcccaggcgcttctctaccgccccgccgagataccaccaccacagcaggttaaaaagaatatgcatcagtgagaagtgcataaagatatgggtgaagtagcgccagacttcaaattttaaaaccggatcgaacggccacgccagccacaccatcaccgtctgatcgccgatgagactcatcgcgatatagaccagcacgcaggcgagcatcacgatccaggtaacagggccggctcgttcacgcagcgtggcgagaaagggaaaacggcgatagcgtagcccgctgttagtctgcccggactgccagctagccgccagataacgcggatcgccgggattttctataaaccgcgccagctcgccccgcacacgttcggcctgcgattcatctgccaaccagatatcgctttgattatgttgctgaatagtaagaatgacgccctgggtggccatgtaatcaacaaatgcctgcgccacgcgaggattcgcaaaggaagtaatcatcaacattattgctgtcgcttagtccatacaaaagaagacagtatatatacccttctcgtcggaggctgcatctttatgggattacgcgccattcgcgacatcggcagggaaacggcgatgccaggcctcaaacccgccgtcaatgctgtaaaccgcatcatagccttgctggagcagatactgcgcggcgcctttactactgttgccgtgatagcacattaccatcacggcggtatcgaaaccatgctcacgcataaacgcgcccagcgtatcgttagtcaagtgaaacgcctgcggcgcatgacccatggcataactttgcggatcgcgaatatcgaccagcaccgccgcgccctggtgcagtttctgatacgcctcttctacagtgatacattcaaattgttccatgaatcgctctttcattattgccggtgaagccaattaaggcattttatcgcccagtgtacgttgacggagtagcttagcgccataatgttatacatatcactctaaaatgttttttcgatgttaccaatagcgcgtttctttgctattatgttcgataacgaacatttttgaactttaacgaaagtgcaagagggcagcatggaaaccaaagatctgatcgtgataggcgggggcattaacggtgcaggcatcgcggctgatgccgccgggcgcggtttgtccgtactcatgctggaagcgcaggatttggcctgcgcaacctcttccgccagttcgaaacttatccacggcggcttacgctaccttgagcactacgagttccgtctggtcagcgaagcgctggcagaacgtgaagtgctgttgaaaatggcgccgcacatcgccttcccgatgcgttttcgtctgccgcaccgcccgcatttacgtccggcctggatgatccgtatcggtctgtttatgtacgatcacctcggcaaacgtaccagtttacccggttccaccggtgtgcggtttggcgcagattcggtgctcaaaccggaaatcgtgcgcggattcgaatattccgactgctgggtagacgatgcgcgtctggtgctggctaacgcacagatggtggtgcgtaaaggcggcgaagtccttacccgtactcgcgcaaccgccgctcgtcgggaaaatggcctgtggattgtcgaagcggaagatatcgacaccggtaaaaaatatgtctggcaggcgcgcggactggttaacgccaccggaccgtgggtcaaacagttcttcgacgaagggatgcacctgccgtcgccatatggcatccgcctgatcaaaggcagccatatcgtcgtgccgcgcgtccataatcagaagcaggcgtatattctgcaaaacgaagataagcgtatcgtctttgtcattccgtggatggaagagttttcgatcattggcacgaccgatgtcgaatataaaggcgatccgaaagcggtaaaaattgaagagagcgaaattaattacctgttgaaggtttataacgcgcacttccagaaacaactggggcgcgatgacatcgtctggacgtactccggcgtccgtccgctgtgcgatgatgagtccgactcaccgcaggcgatcactcgcgattatacccttgatattcatgatgaaaacggcaaagcgccgctgctttccgtgtttggcggtaagctcacgacctaccgtaagctggctgaacacgcgatggaaaaactggcgtcttattatccaggcatcgggccggcatggaccaaaacgtgcgtactgcccggcggcgacatcgacggcagccgcgaagattacgcggcgaagctgcgtcgtcgttatccgttcctgacggaatcgctggcgcgccactattcgcgcacttacggcagcaacacggagtggattctcggcgaagccacgtcgctgcttgatttaggcgaagatttcggtcatgagttttacgaggcggaactcaagtacctggtggatcacgaatgggtgcgccgtactgaagacgctatctggcgtcgcaccaaagaaggcatgtggctgaccgccgaacagcagtcccgcatcacccagtggctggcggcgtatgttgagaaacaccaactttcaatggcgtcgtaataaaatccggggcggtttataccgcccttttcgccacataccgcattcactcgccgggttttgtacagccgggcatatgattagtgatacggtagcgatcgacacttatttgggtaataaagaagggttttgcccgcgcttcgctattccagagagttttccccgttttacaccagcttttatgagaaaagttggcataatgaaccacactctcctcccccagcacgctttcaaaatgcgcgcgtttatcaccgtcggccacgctaaagtcagcataaaaaagattgctgtccaggttaaacgtcatctctatttcactggcggacgatggaaagaacacaggcagccaggtccagataccggattgctcgggtatggcggcataatcaggaaaatagcttacctggcgatcatcgcaggcggtcagcacagcgatgatgattaatgctgcaccacaccggaggacctgattaatcagctcagcaacaatatctttatgccacgaagtggattcacgccgtgcaatacgaatatcagcgccgctggccgggtctatgccaacccgttccacatataatttaacctcttccatttagtccctttatttcgcggccggatacagcggcacatatcccacatcctgcaccaactgttgtccctgcgggcttagaaaccagtccaccagcttttgtgtttccgctgtggggtgttcacgggtgaccatataaacatcaaccgtgtacgggtaactgccgttacgaatattttcaaccgtcggcgcaacatcgtttatcgccagtaatttaatctctttattgctgtgcatctgcgtagcgtaataacgaaaggtatagccaatggcgttgtgcgtattgcgatactcagccacgatatccaccatatcccccatcgcggttgccactgatgttgtttgcgctggcatcagcttcgtttctttcattaccttcgccagcatcgccgtttggctgccagagttttccggtcgctgccagggcttaatgtcgattgcctctccgcccacctcattccagtgggtgattcttccgctaaaaatgccgcgaatttgtacatcactcaacgatgacacgggattgttttggttgacgataaacacaaacgcttcacgtgcaaagggggtgtaaaccagttttacgccactggcctcggccaattgcttttgagcagtggaaggctgggcgacaaaaataagatcggcattaccgttaaggatattttgataggcttcaatggttccctggttttcaaggtagtcttcagggcagatatcatccggaaagcgcgtaagcgcataaaaagccgaggcgtataacggcaagccagccgttgcgccatcgagccgcggccaattttgagtgagcaaaagtgtcggttcatcgcgcagcccggttagcttgttgccccatgtgtgcgcctgataatcgcggaaataaagatattcactgctctcgggagcgggatacttcacggcataaagatgtgactggtatacggcacagctcccgaaaaacagcaggcaaatcaccagcaggttacgacaagtgtagcccgcaccgccgcgtagcactccccaacgcgcaccgccataccctaatgcaaaacagagctgcgagccaaccgggatgagcaacactgcccatacccagccgttgaaaaaggatattacgcggggtactaaccaaagcgtttgcaccacctgggcgatgggcttacaccctatcgcgcgaatattaagatcggtgagaaacatcaggatgacccaccccatcagcaccaccagagcgggcataagcaggcagcaatcacgccattctggatttacctctgatgcatttccctttccccatatccggccacaaagaaaaattaaccctgcgcccagaagcgctaccgggataatggtcgcctcctcaatagatcgcgcgacggggatactattttcaagaacgctaatgtacgcccacattccccccacgataatcgtaataatgttcaccagcagcggcacgccgataaacgccattatgattgacaaaaaaagccaattagcatttttcatttttctatccgctaatccctgcgataacggaagtataaacccggtagtcctgagcccacccatgcatttttctgaaatcgcgacgttaaaacattcacgatagcggcagacagaagttgaaagttccggctgccgttttttatttacaggctcacattaacctgcaagatcgatctttttccgcgcctgcccaacagcatcggcggcccgcaatgccgcctgcacagcctccggcgtaatggtaaacggctcgttgtgtatcgtttccccagtttgacaagacgccctggcaacggccagcagttcatcatcgctaacgccagccagaccaatatccgccagcgtggtgggcaagcctatatcttcacaaaattgataaacctcctcgataagctcaggcgctctatcggtgagcataagcattgccagcgtgccaaacgcaaccttttccccatgccagtatttgtgcgtggcgggcagtactgtcagaccgttatgaatggcgtgcgccgccgccagcccaccgctttcaaaaccaagcccggataatagcgtattcgcttcgataacatgttcgagcgccggagtaacctgatgttgttcacaggcaagtttcgccaggcgtccatagcgcattaaggtggtgtagcaaaagcgcgccagctcaaatgcggtcatcggtcctggcctggtggtcatattgccggcccctttgatgcggcaatcttccgcttcaaaccaggttgccagcgcatcgcctatcccggaaaccaaaaagcgtaccggcgcggcagcaataatactgctgtccaccagcacaagcgtcgggttacgtggaatcatcaggtagcgtttgaatttcccttctggcgtatagataacaaccagtgaactgcacggcgcatccgttgaggccagagtaggaaccacggcaataggcagccgcaggctggcgccggttgcttttgccgtatccagggttttcccgccccccataccaacaatcacatcggcgccaatttcctgcgcgcgtgcggagatgcgagcaatttcctcatcacagcactcgctactgaacacttcgatatcaaattcaatcaccccgtgcagtgctgttgcaactgtatcccggtaggtgttgtgaacaacaggatcctgcaaaatcagcgccttatgaccgagtgcggccaattcctgcgggagatgcgttgtcaacgctcctttaccctgaacatatcgtgacggaaagatcgcggtagtaaccattgtttctccttaaaaagcattaaagttcaatatacagaacacaaattccacataaagaatttaatgctgtttactctgaacgcacaatgaccaggtgagagcataatcttatcctgtgaggcagcgcacaattttggcgatgtattagaccgatgagcagtttccattgggttatccgctctttctcaccttatctccgttcatttttgaagcaaatcacaaaatataaccttccttagagtatggaattgacgctgtatgaatacgtcggcatagtgtcaatatacagaacagcagttccatatacagaacacatttttgatactaaagggatgcaatgatgagcattgaaatagagaaaccgaccacacgagggcgctggctgcatattattccagccacgatcctcgtttatatcgtggcctatatggacaggaccaatatcgccattgggatcgcaggcggcatggatgaagatttaggcatgacggcttcttttgccggtctggtagccgggatcttctttattggttatatcttcctgcaaattcccggcggtcagatagccgagcggctaagcgccaaaaagttaattgcctggacaatcgtcgcctggggtggctttgccctgctgaccggttttgttcagacaccgacgcagttgttgattattcgctttgtgctcggcgtggcggaaggtgctgtgtatcccgccattctggcgctgattggccactggttcccaaatgaggagcgcgccagggctatcgcctatttccagatgaacctggccgtcgcttctattattaccgggccgctttccggctggcttattgaaacctacggctggcgggagatgtttatcatcgaaggcttgctctctctgggactgctctttgtctggctacctttggtttccgatcacccgcatcaggcaaagtggctggatccgaaagagcgcgcctggatcgaacaaaaattgctggccgatcgcgcgttgagtattggcggagaacaaagcagcattcgcggcgtattaaaaagcatcaacctgtggaagcttgtcggtatctatttcttcgtacaggtcggcttctatggcttcgcgctatggatgccaaatctgattaaacacctgaccggcagcggcatgaccatcgttggggtactcactgcggcgccttacgttctgtgcatcatcggtcagtattacatcgccaaatggtgtgataaaacgatgaatcgccgcctttacacggctattcctctgctgggtttcgcggtctgcctcgccctctccttattactgaaagataacgtctggctcgcctacggcatgatggttatttgcgggttcttcctgcaagcctatgccggtccattctggacgctgccgccattactcttcgcccccaacgttctgggcggcgtgcgcggcacgatcaacgccctgggcaacatcggcggctttatcggtccgtacctcgtcgggctgttaacggtgacgttctcgcaaacagcaggaatgaccgtactggttgccgccctgcttatcgccgttggactgcttttcagcttaccttctgttaccgctcgtcctgcaggtagcagcaacacccctaacacctcgacgccgggtgcgtcacttaaacaggaaggaatcgccaaatgagccaaaaatgtcaacatgctcgcgacctgtggtcgcagctcgacgccctgcgtcttggaatgaattacagcaaagaagatgtcaataaactgcaggtcctggtggatgattgctatggtgaaagtcatccgggcagtttccatcttaaccaactgggcgatgaagccgtgctgggtgttcatgaaagcggcggtcgcgcggtccgtcaccatgtgacggatatctgcgacggctggggtcagggccacgatgggatgaactacatcctggcatctcgcgaagccattgccaacatggtcgaaattcatgcctcagtggtgccttatgatgccggtattctgatctcaagctgcgataaatctatcccggcgcatctgattgccgccgcacgcctgaacctgccgctactgcatattcccggcggttctatgcgtccggcaccgaatatgagtacttctgacctcggtgggatcactgctaagttgaagaaaggcgaaatcggcattcagcaagtggaagccatgcagcaatgcggttgccccaccgccggagcctgccagtttatgggaacggccagtaccatgcagtgcatgtcggaggccttggggctggccctgccaggcagcgctttgctgccatcgaccctggcggaaattcgccgcgttgccagaactgcaggccaccaggcgctgtatctggcggagaaaaatatcaccacccataagatcctgactcctgcggcgtttgaaaatgctatcaaagtccatgctgctattggtggcagcaccaatgcgatgatccaccttccggccatcgctcatgaacttggatgggagctgaagcccgaactgtttgatcggatcaataacgaaatcccttatctgaccaatattcagcccagcggtgaatacgttaccgaaatgatgtggttcgctggcggcgtgccaatggtgcaatggtatctgcgcgattatctggatcttgatgtgcttaccgtgactggccgtacgctcggcgacaacctggaaatgctccatcaatccggcttctttacccgcaaccacggttacctcaacaattacaaagtcagtccggaggaggtgatccgtaaaccagaaaatgccaccaaaaaagggtcgattgcggtactgaaaggcaacatcgcgcctgaaggagcggtcattaaatacgcggcctgtgcgccggatatgcaccaccataccggtcctgctcgggtctttaactccgaagaagacgctcagcaggccatcatccataaccatatcgaacccggcgacgtcattttcattcgctacgaaggcgcaaaaggctctggcgcaccggaaatgctgatgactaccgatgccatagtgtatgacaaacgcctcgacggaaaagtcgcattgattaccgacggtcgtttctctggagcgaccagcgggccatgtgtcggacacgtctcgccagaagccgctgatggggggccgattgccctggtggaagatggtgatttaatcgaaatggatgtgaaaggccgcaagctcaatattgtagggatcgacgggatgcctaaaacagaagaggaaatacgccgctgtcttgaagagcgtcgagcaagctggaagaaacctgattattcaaaccgtcgcggcgtctttaaacagttcaccgctaatgcaacatcattaatggccggagcctggcttaaataatatccctggcgggctacggctcgcctgttttaaggatcaatacatgactcagattacgaaatttcacggcgtatttccgccagttccgaccattgttaatgcgcagggagagttagataaagtcggcatggcaaccttgctggatcatcttattgcaagcaaggtcaatggcgtattactgctgggcagtggaggggaattttgccatatgaccaatgcgctgcgtctggaaaccgcagagttttgcgtccgtcatattaaccgccgtattccagtactattaggtattagcagcaccagcacgcaggaagtgattgagtatggtcagcatgccgaccgactcgaagtcgatgccgtgctggtactcaatccctactatgccagattgaccgatgagtatatttatcatcatttcaaaaccgtggctaataacataaaaagcccggtgattctctacaactttccagcattgacgggacaggaccttagcgttgatttaattacccggctggcgcaagatcaccccaatattatcggcattaaggataccgttgataatatcagccatattcgtgaaatcatcaataatgtcaggccagtgcgtccggacttcgttattttctccggctatgatgaatatatgatggatacgcttatcttaggcggcaacggcgggatcccagcgacagcgaactttgcgccacagctaacctgcgggatctaccgcgcgtggtgtgaaaaagagtatgagaccatgttcggattacagcgcaggctgtccgcgctttccactatttacagcctggattcacctttcttcgggataatcaaaaaggcaattcagcttagcggagtcgatatttcaactcatgtaatgccccccgttttgccggcaaatgaagaacatatttcgaatttgaagcagatcttacagcgtgcgggactttaagcgatgacgaaagcgggcttcttgcccgctatgtctttttatttcagcacatcagacgcgtcaggctacggctggcatccatcatcagcgtagcaagcgactcgcgtttatcatcggggatctggaacgtaacgccggatacgctcagggcggcgatcactttcccctgcgtattgaataccggcaccgcaatgcagcgcacgccaagggagtcttcttcgttatcataaccccagccgcgacggcgaattcctgctaactcctgcttaaggatattcaaatccgtgatcgtcgtatccgtaaaacgcgttaatatctgatctggaggcagcaactcctccagctcttccccgctaagccatgcaatcagcacctttcccagccctgagctatgtaatgagaggcgcttgccctcccagcttcgaatcacaatagcctgtgggctttcgactttcagaaggtaaataggggcatcgccctccagaacgccaagatggcaggtcaggccggtgttatcgcgaatctcttcaagaatcggtaacgcgatttttttaatatcgtactgttccgccgctttattacctaattcatacaggcgtagccccagataatacttgtctttttcctggcgtaataacccatgctccaccatgccgttgagcaaagatgaggtactgcttttcgcaatccctgaattttgatggatctgggtaaacgttgcgccatcgcactccagaaggtaagcaaatacgcgcataattttatcgagagccggaatagatgtcgtaatctttttcatattattatcaattaattatggatttttctgctaatactatacaccagtactcgaccctttttccatgacagagaccaagtgccgctaacagattcagcagacgaatatcggcataccccccgaatataccacgataaaaaacggggccgtttggccccgttctcaagcgttaaaccgctacaaccgcaccggatcaatatgccagatattttcggcatactctttgatggttctgtccgatgagaagtagcccatattggcaatgttgagcatcgctttcgtcgtccattcttccgggcgacgatacaactcatccaccttatcctggcagtccacgtagctgcggtagtccgccagcacctgatagtgatcgccaaagttaatcagcgaatctaccagatcgcggtaacggcctggctcttccggattaaagacgccgctaccaatctgcgtcagtacctgatgtagctcttcatctttttcataatagtcgcgaggcttataaccctgcctgcgcaacgcttccacctcttcggcagtattaccgaagataaagatattctcctcgccgatatgctcctgcatctctacgttcgcgccatccagcgtaccaatggtgagcgcgccgttcagggcaaatttcatattactggtgccggaagcttctgtccctgccagcgaaatctgctcagacaggtcggcagcgggaatgatcacctgcgccaggctgacgctgtagttcgggataaacactactttcagcttgtcgccaatctgcggatcgttgttaatcactttcgccacgtcgttgatcagatgaataatgtgttttgccatgtaataggcggaagccgccttaccggcaaaaatattcacccgcggcacccagtcggcctccggattttctttaatgcggttatagcgggtaatgacatgcagtacattcatcaactgccgcttgtattcgtgaatacgcttaatctgcacgtcgaataacgctttagggttcaccaccacattcagttgttgcgctatcactaccgccagccgttttttattttccagcttcgcctgacgcaccgcatgattgaccagcggataatcacaatgctgcttcagctcgctgagctggctaagatcggtacgccaggtacgaccaatattctcatccagcacgtcagaaagcggcgggtttgccagcgccagccagcggcgcggcgtaacgccgttagtgacgttacaaaaacgggtcgggaaaatcttcgcaaaatccgcgaacagcgactgcaccatcaggttggaatggagttcagaaacgccgttgactttatggctgaccaccaccgccagccaggccatccgtacccggcgaccgttcgactcatcaataatcgacgcgcgtccaagcaggctggtatcgttgggatattgctcctgcaccgttttcaggaaatagtcgttaatctcgaagataatctgcaggtgacggggcagaattttccccagcatatcgacaggccaggtctccagcgcctcgctcatcaacgtatggttggtataagagaagacctgacagcacacctcaaacgcgtcgtcccagctaaatttatgttcatcaatcagcaggcgcatcagctcaggaattgacagcaccggatgcgtatcattgaggtgaatggcgattttatccgccagattctcataggttttatgcagttgataatgacggtgcaggatatcctgtaccgtcgccgagaccagaaaatactcctggcgcaggcgtagctctcgtccggaataggtggaatcgtccggatagagcacccgtgaaacgttctcagagtggtttttatcttccaccgccgcaaagtagtcgccctggttgaatttaccgaggttgatttcactactggcctgcgcattccacagccgcagtgtgttagtggcgtcggtgtcgtaaccggggatgatctgatcatacgcgacggccagaatctcttccgtctcaatccagcgcgcttttttaccttcctgctgaatgcgcccgccaaaaagcaccttatagcgcgtattgtggcgcttgaactcccacgggttgccatattccagccagtaatccggagactctttttgccgcccgtcgacaatattctgcttaaacatgccgtaatcgtagcgaatgccgtacccgcggcccggtaatcctagcgtcgccagcgagtccaggaagcaagccgccagccgtcctaagccgccgttgccaagccctgggtcattctcttcatcgatcagctcttcgagatctaagcccatggcctccagcgcgcctttaacgtcgtcataaatgcccaacgagagcagcgcgttagagagagtacgaccaatcaaaaactccatcgacaggtaataaacctgccgggtttcctgcgataattgggctcgattagaacgcagccagcgctccaccagacgatcgcgcaccgcgaacaacgtggcgttcagccattcgtgtttattggcaatgaccgggtctttaccaatcgtaaacatcagcttataggcaatagaatgcttaagcgcctcaacgctgagagtgggcgatgcataagtaaacggagcattcatataaatgattcctggatgactatttcaagcgatagtacagctcgcggtatgatttcgcggcaacttgccagctaaaatccatcgccatcgcctgccgttgtacaaaccgccaaagcgaaggccgtgaccacaacacaaaagcacgccgaatcgcgcgtagcaacgaccaggcattactgtcttcaaagacaaaaccgctggcgataccgtccgccagattttccagcgaactgtcggagaccgtatcggccaaccccccggtacgccgcaccagaggcagcgtgccatactttaagccatataactgcgttaagccgcacggttcgaaacgactgggcaccagaataacgtccgcgccgcccataatgcgatgcgagaaagcttcgtgatagccgatctgtacgccaacctgccctgggtgttccgccgccgccgcgaggaacccttcctgaagcaccggatcgcccgcgccgagtagcgccaactgcccgccctgctccagcagccccggtaacgcctccagcaccagatccagacctttctggttggtcagacggcttaccacggcgaacagcggcactttgtcgttaaccttcaaccccatcgcaatttgtagctgacgtttgttttccgccttctcttccagggtatcgcgcgtgtagcgcgacgccagcagcagatcggattccgggttccagatcttctcatccacgccgttcagtatgccggacaagcgcccttccagatgacgctgacgcagcaggccttccataccataagcaaactgcggttcagtaatttcacgcgcataggtcgggctcaccgccgttatatggtcggcatagtacaaaccggccttcaaaaaggagagttgtccgttgaactccagcccatgcatattaaagaatgaccacggcagttcgatgtcatccatatgctttgcataaaacatgccttgataggccaggttgtgtacggtaaagaccgatttcgccggccgcccgcgcgccgccagataggcgggcgccagcccggcgtgccagtcatgggcgtgcaccacgtcggggcgccagaatggatcaagtccgcaggccatttcacagccgacccaccctaacagggcaaagcgcagcacgttatcggtataggcatataaattcgtatcgtgatagggactgcctggacgctcgtacagatgcggcgcgtcgatcagataaatgcccacgccgttataatgcccgaacagcagcgatatcttacctgcgaaagtatcgcggcggctcaccacatgcgcgtcgggtatcccccgacggatatcgggaaaccctggaagcagaacgcgaacatcaacaccatccgcaatttgtgccgcaggcaacgcgcctatcacatccgccagccccccagtcttcagcagggggaacatctctgaacatacatgtaaaacctgcattatcgctcctgtttgacctgcagtttgcgcagcatttcacgcgtgaccagtacaataccttcttctgaacggtagaaacgacgagcgtcctcttccgcattttcaccaatcaccatgccttccgggataatacaggcacggtcaataacacagcgacgtaaacggcaggagcgccctacccaaacctcaggtaacaacactgccgaatcaatattacaaaaagaatttattctcacccgtgggaagagcacagattgcaccaccaccgaaccggagataatgcagccgccggagaccagcgagttcagcgtcataccgtggctaccggagcggtcctgcacgaatttcgcaggcggtagcgattccatatgcgtacggataggccagttctggtcatacatatccagctccggcgtcaccgaggctaaatccaggttcgccttccagtaagcttccagcgtacctacatcgcgccagtacggttcggcttgtggatcggactgcacgcaggagagcgggaaaggatgcgcgtaagccataccttcgcgggtgattttggggataatgtctttaccgaaatcgtggctggaagcgtcatctttatcgtctgccgccagcaattcatacaggtaatcggcgtcaaaaacgtaaatgcccatactggccagcgatttgctggcgtcaccaggcattgcggggggattcgccggtttttcgacaaaatcaataatcttgtcgctttcatcgaccgccatcacgccgaacgccgtcgcttctttgatcggcaccggcatacaggccaccgtgcaacgcgcgcccttttcaacgtgatcgatcaacatacgcgagtagtcctgcttgtagatatgatcgcctgccaggatgacgacatattccgctttatagcgacgaataatatccaggttctgggtcaccgcgtctgccgtgccgcgataccagttttcgcccttcatacgctgttgggctggcagcagatcgacaaattcgttcatctcttcgctaaacagtgaccagccgcgctgaatatgctgcaccagcgtatgggactgatactgagtgatcacgccgatacggcgaatcccggagttcagacaattagataaggcgaaatcgatgatgcggaacttcccaccaaagtggacggctggtttggcgcgtttgttcgttaaatcttttagacgcgtgccgcggccgccggccaggattagggcaacagatttcaatggcagctggcgcgccaacattacacgatcgttcttctctaaactcaccatgattaactccttttttatcctctctggaacacacacagtccatgcgcaggtccctgccagaccgccgttatcaccggattatcctctccagcgaatgggggaacggcgcgccattccccttcgggtaaaactatatctgtcacctcaagcgtggcatttatcgcaatcagaaaacggtccgacaacagaatttgcatcagcttaggcccgttttgccactcatccgcactcaagggttgcgcgtttttattcagccaacgcacgttgccatcgccttcttcccaccagctattgccggttaaagccggtatctgctgacgcaaacgaatcagcgcggcggtaaacgtggttaacccacgatttgcctgctgccagtccagccaggttaaggcattatcctgacagtaggcgttattgttgccatgctggctatggccgtgttcatcgcctgccagcagcatcggcgttccctgagagagcagtagcgtcgccagcagggcatgaatgctgtcgcgccgccgctccattaaatcaagcggaccgcctaatccttctttaccatgattgtcgctgtaattgctgttggtgccgtcgcgattttcctcaccgttcgcctcattgtgtttctgattgaaacagacgcagtcccggagcgtaaaaccgtcatgcgccgtgagcagattgacagaggcgccgggcgcgcggccattgcgtttaaacacatcgctggaagcggcgaaacgacaggcaaactccccggtcgtcaggttacgcggcaaccagaatcggcgggccgcatcgcgaaaatgatcgttccactcggcaaacggtggcggaaaattcccgacctgatagccgccctcgccaatatcccacggttcagcaatcagcttgaccgttgataacacaggacacgctttaatcgcggcaaacagcggcgcatcctggcgaaacgtcggcgtgcgccccatgacggacgccaaatcaaaacgaaaaccatcgacatgacaggtttccacccaatagcgcaaacactcgcacgcgtattccaccacgccgggatggcttaaattgagcgtgttgccgcaccccgtccagttgtgataatcgccatcgtcccttatccaataatagctacggttatcaattccgcgcagggagaaggttggaccgtccagatccagctcggcgctatggtttaatacgatgtccagaatgacctcaatccccgcacgatgcagcgctttcaccgcatcgcgaaactcgtccagcgccgtctcgggcgaactggcccaggcgggatgcagcgcgaacatcgccatcgggttataaccccaataattggtcagccccatacgttgcaggcgcggctcgctggcaaactgcgccaccggcaacagttccagcgccgtaatgccaagctgtttgaagtacgccaccatgaccggatgaccgagcgctttataggtaccgcgtatctcctgggggagctccggatgcaggtaggtaagccctttgacatgcgcttcatagatgaccgtttttccccacggcgtgcgcggcgcggcgtcatcttcccagtcataatggtcgctgattaccacgcttttcggcgccaccgccgcgttatcgcggtagtccggttcatcgtgtccgccgtgcaacagcggatgatcttttagttcgccctcgacccggcgcgcataaggatcaagcagtaacttcgccggattaaaccgatgcccctgcgctggctgccacgggccatgtacgcgatagccatagcgcaaacctggcctggcgccggccagataaccatgccagacatcgccgcgacgtcctggcaggtcatagcgacgctcattccctcgggaatcaaaaacgcacagctctacgcgctccgcatgggcggaaaagagcgtgaaattcacgccatgaccgtcatacgttgcgccatgcggcgttgcttcgccgatcgcaagctgcgtcattccccctcccgcatcagccagatcgtcgccaacggcggtaacgtcaggttaagagagtgctgacggccatggctttcgatctcatcgctgtgcaccacgccgccattgccggtgttgctaccgtgataatgcatcgaatcagtattgagaatttcacgccagcgtcccggctggttgatgccaaagcggtagtcgtggcgaggaacgggcgtaaagttgctggcgacgatgatctcgttaccggctttatcacggcgtacaaaaatcagtaccgagcgttcattgtcatcgaccaccagccactcaaagccgtaagcatcaaaatccagctcatgcaacgctttatggtggcgataggtgtggttgagatcgcgcaccagacgctgaaccccgtggtgccagttatcgcccccctccagcaggtgccagtcgaggctggcgtcatggttccactcgcgtccctgggcaaactcattccccataaacagcagtttcttgccggggaaggcccacatccaaccataataggcgcgcaggttggcgaatttttgccacgcatcgcccggcatacgatcgagaatggatttcttgccgtgaaccacctcatcgtgcgacagcggcagaacaaagttttcggtatggttgtacaacataccaaaggtcagcttgtcgtgatgatactggcggtacaccgggtccagcttcatgtagtccagcgtgtcgtgcatccagcccagattccacttgtaccagaaccccagcccacccgtttccggtggacgcgtcacgccagagaagtctgtcgactcttccgccatgctgaccgcgccgggcacctgctcgccaataatgcggttggtattacgcagaaactcaatggcttccaggttttcacgaccgccgaactcgttcggtatccactcgccctctttgcggctgtagtcgcggtagatcatagaggccaccgcatcgacacgcagcgcatcaatcccaaaacgctccatccagtacagggcgttacccaccagataattactgacttcacgacgaccatagttgtagatcagcgtattccagtcctggtgatagccctcgcgcgggtcgctgtgctcatagaggtgggtgccgtcaaactccgcgaggctaaattcatcggacgggaaatggcccggcacccagtcgagaatgacgttaaggcccgccgcatgggccgcattgatgaaataacggaagtcgtctcgcgtaccaaagcggcgggtcggcgcgtagaggccggtcggctggtagccccaactgccgtcaaacggatgttcgttgaccggcaagagttcaaggtgagtaaagcccatccatttggcgtaaggcacaagctgatccgccagctcacgatagctcagccagaaattgttatccgtatggcggcgccatgaacctaaatgcacctcataaatcgagatcggcgcatcaaactgattggctttttgtcgttcttcgcctggcgtcactttctccggcagtccgcaaatcatcgacgccgtttccggacgcatctgcgcctcaaaagcatagggatcggctttaatgcgcagattaccgttcgcatcaagcagctcgaatttatacagttgtccattatgcgcgccggggataaacagctcccaaataccgctctctttgcgcagacgcatcgggtggcgacgcccatcccaatagttgaattgcccgacaaccgaaacgcgacgagcattaggcgcccagacggagaaacgggtgccggtgacgccatccatcgtatcggcgtgcgcgcccagcgtttcataaggacgcaggtgggtgccttccgacaatagccaggcatccatttcctgtattaatggaccaaaacggtaaggatcgtcgatgaggttctgctgtccgtgccaggtcacggcgagctgatagcgaaagaaatttttacgtcggggtaaaacgccgcagaaaaaaccgcgagcgtcgagacattccagtttgccgactttacgtccggttttgggctcaatcacccatacgtcggtggcgtcaggtaagagggcgcggacttctagtccggcttgggtctggtgcattccgagtacggaaaaagggtccgcaaaatgtcctgcaattagcgcattaatcacgtctctatcgatacgactggacatggtttgtcatcctgttttgtggcgtcactccatctcactgaattcaacatcaggtagtgacacttctttgacctgaacggcgcagcacactgtgcatcctatctgcgtcgtcctaccttcaggttaggcttaatacccgtgggattaagctacccttaaagaatagccaatgctctgcttaactcctgataaaaatgaaacatctgcgtttactcctgtattacgcaaaaaaagggtgacgatgcacccctggtttaacacaaatttccccgccggatggcggcgctgacgcgccttatccggcctacagaaccacacgcaggcccgataagcgctgcaatagccactacgccaactggcgcagcattcgacgcagcggctcggcggcgccccataacaactggtcgcctacggtaaacgccgacaagaactctggccccatgttcagcttacgcagacgaccaaccggcgtagtcaacgtgccggtcaccgccgccggggttaattcgcgcatagtgatatcacgatcgttcggcaccactttcgcccacggattatgtgccgccagcagttcttccaccgtcggaatggatacctcttttttcagcttgatggtgaacgcctggctgtgacagcgcagcgcgccgacgcgcacacacaaaccatcaaccggaatcacagaggcagtattgagaatcttgttggtttccgcctggcctttccactcttcgcggctctggccgttatcgagctgtttgtcgatccaggggatcaggcttcccgccagcggtacgccaaagttatcaaccggcagctcgccgctgcgggtcaatgccgtaactttgcgttcaatatcaagaattgcggaagacggcgtcgccagttcatcggcgacatggccatacaactgacccatctgggttaacagctcgcgcatatggcgcgcgccgccgccggaggcggcctgataggtcgcgacggatacccagtcaacgagattatgggcaaagagaccgcccagcgacatcaacatcaggctaacggtacagttaccgcccacaaaggtcttcacgccattgttcaggccgtcggtaatcacgtcctggttgaccgggtcgagaataataatggcatcatctttcatgcgcagcgtagaagccgcatcaatccagtaaccctgccatccgctttcgcgcagctttggataaatttcgttggtataatcgccgccctggcaggtcacgatgatatcgagcgcttttagcgcatccagatcaaaagcgtcctgtagcgtgccggtggaggtgtcgccgaaggtgggcgccgcctgtccaaactgggaggtagaaaagaaaacagggcgaatagcgtcgaaatcgcgctcctctaccatgcgttgcatgagaacagagccgaccattccgcgccagccgataaaaccaacatttttcatagcgtttttttcctgcaaagagatgtgctgtgtatgcgcgccagtatcctgtggcgcatccttcaccatacaaaaagcagccaaagtcgcaagtgaaattaatcaatgatagcgaagccatcagtaatgcgacttatcctgccttaccgcgcaagcagaaagtccagtggcgattatcagggaatttgcgttaggaagggaatcatttccgtcgctgttttattgatcctaattatggatcagcgtagaaatttgcctgcttttatgcgcgtactgaaacatggcgaggcaaaatgtcgttgggcgattgccatgcacacctcaataaaaaaaccgggtagcgattacgccttacccggcttacggtgtcgatatgtgcccgtttccaggcccggtaagcaccgcgccaccgggcaacaagactcagctcagcagttggaaagcaatcatcccgacaatcgcgccgaccgtaccgaggatagtttccatcatcgtccaggtttttaacgtctgcgcttcggtcgcgccggtaaatttaccgaacagccagaagccagcgtcgttaacatgagaaaccacaattgaaccgccggcgatacagatagagagcgcagccatctgcgcgccggagaaattcagttgctctatgaccggcatcaccagaccgaccgcggttaaacacgccacggtcgcggaaccctgaatgatgcgcactgccgccgccagcacaaagcaggtaatggcaatcggcagtcccataccggttaacgcttcgcccagcgccgggccgacgccggagtcaaccagtacctgtttgaacaccccgcctgcgccaatcaccagcaggataatgcccgccggttgcagcgcgtggccacagatttccatcactttgtctttcggcatcccctgacacatcgccaggccataaatcgctaccagacaagcgaccagaatcgcagtgaaggggtgaccgataaactcaaaccattcgtaagcggtggaaccttccggcacaaaacgcgcggcgatcgttttcagccctaccagcaccaacggcagcaggatcagcgacaggctgaagccgaaagaaggcattttgccttcgcccagatgcggctcggtaatgtcttccggtacatgcagttcaacgtaacggctgatgaaattgccccacagcggcccggcgataatcatgcccggaatggctgcgcacaggccaatcaggatcatccagccaaagtcagcgtgcatttgggatgccagcagcatcggcgcaggtcccggcagcaggaacgctgcggcagccgccacgcccgcaaacagcggaatgaccagcttcaccaggttcgttccggtgtggcgcgccattgagaacgccacgcttatcagcagcacaatcgccacttcaaagaacagcggtagcgcgcaaatcagaccggccaggccaatggcataatgcgcgcggctatgaccgaaagatttcagcatcttgacggcaatctgatcgaccgcgccggtctcgtgcagaatcttgccgaacatcgcccccagcgcgaccacaatcgccaggaatcccagcgtgccgcccatccctttttccatggtcgcggcgattttatcaagcggcatccctgaaaaaagccccgcgcccatcgagacgaccattaacgcgacgaaggcgtgcatacgcgccttcatcaccaaaaacagcagcagtaagacggaaccgacggcggttaaaaccagtgttaatgtactcacagcgtactgcctttattgatgacctcaatggtgctcgccacgacgccttccagcggctggtcgatatccaccaccagaacatcgcgttcgtcggcacccggctcttgcagcgtttcaaactgcgtcaccagcatttgggttttgaagaaatgacctttgcgcgctttcagacggctttcaatgacgtcgaaatcacctttcaggtagataaaggagaggttcgggtttccctcgcgcagcaggtcgcgatagtgttttttcagtgcggagcagacgatcagcgagattttattggtacgctgcatcgcgaaagcggcgtcgttcagcgcctgtaaccacggtttgcggtcatcatcattcaacggctcgccggaagccattttttcaatattgcagcgcggatgcagaaaatcgccgtccagaaacgcggcatgaagctgatgcgccacggcgcttgcgacagcggatttaccgctgcctgatacgcccatcagaacgtaaacgtggtgatcatgattagtcgtgctcaaagcgggcccccactctacaagttgcaaaatttgttacgggtaactgttatcggtaacattgtccaaccgcaccattcacgacgcaatgaccattcgtgccaaaagtgaataagtgtgagctacttcaaagttgtcagactaaatagatccgcccggtgacaaggtgaaacctaaatctaacattttcggcgtgaccgtttcgccgcgaatgcgggccaacagacgttccgcgccaatgctgcccattcgctcgcgtggcgtcaggacgcttgccagacgcggttccatcacctggccgatgtcatgaccgtggaacccggcgatcgccatgtcgtccgggatttttagccccaggcgctggcattcgaaggccgcccccaccgccaggtcatcgttggtgcaaaaaataccgtcaagctgtgggtattcgcgtcgcgcctggcgcatgagttcgataccggaagagtaggatgaagattgctccatcatcacactgtaaggaaccagccctgcgtcccgcatcgcctgttcatagcccttctgcttgatgatagtacgttcgtcgaggcgcgcccccagataggcgatatgacgatgaccacgcgcgataatcgcggcggtcatctgacgggcggcctcgaagttatcaaaaccgacggcaatatcgagacacggcgactggctgtccatcagttccaccaccggaatcccggcgacttcgatcatttttaaggtgcgcggcgtatgggtacgctcagtgaggatcaggccgtcgatattccaggagagcatcgattccaggcgctcctgctccatctccggtttatagccgtagtgcgccagcatggtttgataaccatgcgcgtcggtgacagcctcaatgccgcgtaacacttccgcaaagacctggttggttaaagacggcagcagaacgccaatggcgcgactggtggcgttggaaagaatgtcaggcgcgcgattaggaatgtacccgagctcatcaagcgcagccgcaattttaccccgcagcgcgacggagacctgctccggattacgcaaaaaacggctgaccgtcattttggtcacgcccacacggtcggccacatcctgaagtacgggtcttttctttttcatcgtcctgaaaggtataaaagggatagatttgcccagtttaccacggacatgcggaattaatgacaaacgatgaaaagccggatggcaacgctttcgcgtcttatccggcctacaaaaggttacagcacgttaaactggcggcaagtcaaacagcaacacttcactgtcgctgtcggcatgaatcgagattgcctgctcatcccaaatcgccaggccgtcgctggtggtggctttggtgccgttaatggtcacgttaccttttaccacctggatccagacgcggcgctcagcggcaatctgatgcaccgactgctcatctttgagcagcgcccagcggtacagctccatatcctggtggaccttcagcgaaccatcgcgagcatctggcgaaagcaccagttgcttgccctgcgcggcgtcgaagcggcgctgttcgtagcgcggcgtgatgccggtttcttgcggaatgatccagatctggtacagccgcagacgatccgttttgctcgggttgtactcggagtggcgaacgccggtcccggcgctcataatctggaattcaccggccggaacctgttctttattgcccatactgtcctggtgttctacggcgccttccagtacataggtcaaaatttccatgtctttatgcggatgcgtgccgaaaccctggcctgcgtcgatcacatcgtcgttaatcacacgcagcgccgagaaccccataaagttcggatcgtaataatcggcaaaagaaaaggtatgccaggagtcaagccagccatgattcgcatgaccgcggtcgtttgctttgcgtaagtagatcattgtgttcacccccagatgttttcgatggaataagtgtggactcattccgtccgggatcatagagggtgaaaattgactcctctgttcaaaaaatatgaataagcgcagaggagtctgtaagggctatttagccagggttatcgtcgcaggcgttgcctgttcgaaggcacgttcgaggatttccaggttggtaagaacttcagattccttgacgtaattaggcgtaccgacggtcaacgtctggtacagcgcatcatagacgcgaccatagtcacccgtttccggtttcacctcttctttcaccgtaacgccgtcgtcattgacatactccagcacgccgacggattcgtcagcggcgaaaccgggttcaccaggcataatgttcgctttcaggctggtttcttgttgatcgataccgtatttcacaaacgaacctttggtgccgtgaacaataaacttcggatagtcgattttcaccagatggctggttttcacaatggctttcaggtcaccgtagaacaattgcgcttcaaaggtgtcatccggattcgctttattacgcaggctacgaatgtcatacgcgacatgatccgggcggccaaatagcgaaataatttgatccatagtgtggacgccaagtccgtagaaagcgccatcctgcggcaggcccggtttggtttccgccacgggtcggtagtagtcaaaatggctttcaacttcgacaatcttgcccagtttcccgctctcaatcgcttttttagcagtgagaaaacaggaatcaaaacgccgattctgatacggcgtgacggtcagtcctttgcttcgcgccaggtcgaacaacacttttgcctccgccagcgtcggcgtgaaaggtttctcaaccagcacatttttacccgcttccagcgcgcgtttagcgtattcgaaatggctgtcagcatgcgtacagacgatcaccagttttacctgcggatcgcccaacacctcatccagatcgctggtgaagtgaatatgcgaatactgcggcgcctgctcttccggtttagcgtgacgacggaaaatatgcgcgacatgccaggtatctttccgattcagaacataggggagatggtaacgggtggtacttttgccgaatccaataaatgcgcagtgtaaggtcatgagacgatccttttgaagatgattgtctacaccatagcgtaaagcgtgaggagactgaatgttggattctttgccggatgcggcgttgcctttttgggcctacaaaagcagatgcctcaagatcggccgtcggcgtcgcggtcagtttgttcacggcaagcgcgcagggcccggagcgtactaaatgtacgtgaggagcacgagcacttcccggggacaaaatgacaagtaagccaggctgaaacaaaacccaaaaaaaaagccagcaaaagctggccaaaataatactggaagcaatgtgagcaatgtcgtgctttcaggttctccgtaggggttcccctggatgcaaggaaataataatcattctcattcgcagttgtctacttctttttgcaaaaaaaatgcggttgacggaattttctttctcagcgagtgtaaatacacaattaaccctgcaggagataaggaatgagtgaaatagtgatacgccacgctgaaccgaaagattacgataccattcgtcagatccacgcccagccggaggtgtaccacaacatgctacaggttcctcatccttccctcgaaatgtggcaggcgcggctaaccgagcaagccggggttaaacaactggttgcctgcattgacgatattgtcgttggccatctttctattcaggtcacccaacgtcctcgccgcagccacgtggccgattttggcatctgcgtggatgcccggtggcacaatcgcggcattgccagcgcgctgatccgcacgatgatcgacatgtgcgacaactggctgcgcgttgaccgtattgagttaacggtgtttgttgataacgagcccgccgtggcggtgtataagaagtacggctttgaaatcgaaggcaccggtaagaaatacggcctgcgcaacggtgagtacgttgatgcgtactttatggcgcgcgtgaaataacgcttccccgccccaccctgtggggcgaaacgtcacaaaccttcacaacattccagttattgcaacctacttcccctatatcaaaacaataaccatctgaatttcatggttattaccactttaagctttatcaccgttttttccgtaattttagcaatattaatattacatttttgtttttttttggtttctgccatcactttatggtgacaatcacaacaatatactcctcccgggactaatttaaccacggtgaggtaaaaaatgaaatttgaacgccatcatagaatattgaaggaactcagtatttcgggagttgtaaaagtttcaaatctggcgaaaagtctcaaggtaacaaaggaaactattcgttcagatctcaatgaacttgccggacagggatatcttactcgctgtcatggtggtgcatttattacccttgattctcttgataacgtcgcaaaaaatgaaattgcttatgtgctggaaaaatatgaatcagcgcagaaaataaaaaaaggtctctctgccatgaaaaataatgtatgtgttattggctcgttcaatgttgatattatcagttatctaccgagattaccctcaacgggagaatcattgctggccgataaatttattttttcacccggcggtaagggatgtaatcaggcattagcagcaagctatgccgattctgatgtgcattttattactaaagtcggctcagatcattttagtgattacgccattaattttataaactcatcaaaaatccataaaagtgttatctaccagaccaaagaaacacaaacaggtacagcaaccatcatggtgaatggagataccggagataacgtcatcgctatctaccctggcgccaacatgacaatttcccctgatgaaatcaccattcagaaagaagccattgttcattcagatattgttcttgtccaactggagacgaattacgaagcgctgcagcaaacaattcgtctcgcacaaaaaaatgacataccggtcatcatcaatccagcgccgtacaatgacatggttaacaccatcattgataacattgattatattacgccaaatgaaacggaagcaggcctgctggccaatatggcggttaatgatatcgaatcagccaaatgcgcggccaaaattattcatcagaaaggcgtcaaaaataccattattacattaggtagcaaaggttcgcttgcttatgatggcacacaattcatctattccccggcatttccggcagttgtaaaaaatacggcgggagcgggtgacgctttcaatggcgccctcgcatctggtcttgcaaaaggaaagtcactggcatccgcattgtgctacgccagcgcatttgcctcacttgcggttgaaacgcctaatgcctctgatatgccggaaaacgactccgttcttcatcgtattcagggttcacattacaaacaaactatctctactcactaaatcaaggagcagactatgaacaatacgcagaaaaaactaaaggtgctctttattggagaatcctggcatattcatatgattcattcaaaaggttatgacagtttcacctccagtaaatatgaagaaggcgctacatggttactggaatgcttgaggaaaggcggcgttgatattgattacatgcctgcccacacggtacaaattgcctttccagagagtattgacgaattaaaccgttacgatgttattgttattagcgacattggtagtaataccttcctgttgcaaaacgagacattttatcagctaaaaataaaaccaaacgctctggagtccattaaagagtacgtcaaaaatggcggtggactactcatgattggtggctatctgtcgttcatgggtattgaggcaaaagccaattataagaacaccgttcttgctgaggttctgccagttattatgcttgatggcgatgaccgggtagaaaagcccgagggtatctgtgctgaggctgtctcacctgaacatcctgttgttaacgggttctcagattatccggtatttcttggatataaccaggccgtcgccagagacgatgccgatgtcgtattaacaataaataatgacccattgttagtgttcggtgaataccaacagggtaaaaccgcctgctttatgagtgactgctccccacactggggaacccagcagtttatgtcatggccgttttataccgacctgtgggtcaacacgcttcaattcatcgccagaaaataaaaaacaatggagtaacgaaagttactccttttataaaatataaggattgatgtatgaacaagaataagtactcaacccccttactgatgcttgccaccatcttagccggtatgctttccccgatgcagtctgccgttaatgggcagttaggacattggttacaagacggtaatgcttgcgcagtaatctcgtttgccagcggtctggtcgtcatgttttttattattattgcgcgcaaagaaacacgccagcaattcgcctcaatccctactctgattaaaaagagaaaaatcccgctatggaattggtttgcaggattatgcggggcgatggtcgtattttctgaaggcgcatccgccagcgcgctgggcgttgccacctttcaaacggcattaatttccgccctgctcctttccggactgctgtgcgaccgttttggcatcggtgtggaggagaagaaatattttacgccatggcgcattactggcgcattgttcgccgttatcgccaccatttttgtcgtgtcgccacagtggcactcaacctcgtttatcctgctcgctatcctcccctttttggcagggttactcgctggctggcagcctgcggggaatacgaaagtcgccgaggcaacgggctccatgctggtgtccattacatggaacttcatcgtcggcttttgtgtcctgggcgcggcgctggcgatacgtatcgcattaggccatgtcaccatccagttacccgatacatggtggatgtatctcggtggtccgctgggtctgctgtccatcgggctaatggcgattctggtgagaggcttagggctattgatgctgggcgtagcgtcaacagcaggccaactgcttggctcagtgctaattgatgaattgatcccttcattaggcaatacggtctacctggtcaccatcatcggtacgctgttcgcgttagtcggtgcgattgtgaccaccatccctgaatacagagcatccaaaatggcgcaaagaatagaggtgtcagaatgaaaggtttcctgcaaaccgtaacaggcccggtggcgcatacggatatggggctgacgctaccgcatgaacatctgtttaacgatctgtcttcggtcgtagacgagccacattatgctttttcacagcaactggtgggaaagaaagtcagtgctgacctgcagtggggactgaaacacgacccatactgctgcgccgataacatggaccgcaaagagattgatgatgttatcttcgaaatcaataactttatgtctttgggcggcaggacgattgtcgacgccaccggatcagaatccattggacgggacgcctcagcgctgcgagaagttgccttaaaaacgggtttgaatatcgttgcgtcatccggaccttatctggagaaatttgaaagtacccggatccataaacctgttgagctgttagcctcactcattgataaagaactgaatcagggtattggcgagacggatattcgcgctggcatgatcggtgaaatcggcgtatcccccgcgtttacccaagcggagcgtaacagcctgcgggcagcgtctctggcacaatgtaacaacccccacacggcaatgaatatccatatgccggggtggctgcggctgggggatgaggtgctggatatcgtgctggaagaaatgaacgtctctccggcaaaagtctcgctggcgcattcggacccttcaggaaaagatgtcgtctatcaacgtaaaatgctcgaccgtggcgtatggcttgaatttgacatgattggtctggacatcaccttcccaaaagaaggtgtcgcgccgggcgttcaggagaccgcagatgcagtagcgaatctgattgcactgggttacgccgaccaaatcgttttaagccatgatgtttttctcaaacagatgtgggcgaaaaatggcggaaatggctgggggtttgtcccgaatgtcttcctcgcctatctggctgctcgcggagtagacaacgatactctgcgcaagctttgtattgataatccagcccgattactcacggcataatctgcaaatagcccggtgtctgacaccgggcctggaattaaaaatcagtatcccgccgttaaatcatccaccgaacgcgggtcggaagcgccatacagttcaccatccggtccaaccataatactttgggtgctgcccatcgcttctttcagcgccactttctgccctttctgttccagcaactttagcgtatcggggctgaagcccttttctacccgcagttcgtccggcaaccattgatgatggaaacgcggcgcgttggtcgcttcggcgacgttcatgccaaaatcaatgctattcactaccatttgcagcacagtagtgatgattcgactcccgccagggctgccggtcaccagccaggttttgccctctttaacgacgatagtgggcgacatcgacgacagcggacgcttcttcggaccgaccgcgttagcatcgccgcccaccaggccataaacattaggtacaccgggtttagcagaaaaatcatccatttgattattcagcagaataccggtatttcccgccacaattcctgtgccgaaggtggtgttcagggtataggtcaccgccacagcattgccgtctttatccaccaccgagaagtgggtggtctggttgctttcatacggggcgagcttgcccggttttatctggctggaaggtttggccttgttgatatcaatttgatcggccagcgttttcgcataggctttgtgggtcagcgcctgccacggcactttcacaaagtccggatcgcccagatactctgagcggtcagcgtaggcgtatttttccgcttccgccatgatttgcatggcatcggcgctgccaaagccgtacttcttcatgtcgaaattttcaagaatattaaggatctgtacgatgtgaataccgcccgaggatggcggcggcatggagaagacctgatacccgcgatagtcaccgctgattggcgtacgctcaacggctttatagttggctaaatcctctttggtcatcagaccgccgttcttctgcatttctccggctatttggtcagcaatcgcccctttataaaacgcatccgggccgttttcggcaatcatttccaggcttttcgccagattcttctggaccagcttatcgccttttttcagcggctcgccgtctttccagaaaatggctttgctgttctcatggttgaggatcacttcgctgccgtaagtttttaagtcgttggccagcgcatcgttaaccacaaaaccctcttccgccagcttcatcgccggacgcaccactttattcagcggcatcgtgccgtatttctccagcgccagcgagaaccccgccacggtacccggcgtaccggatgccagatgcgacgtcagcgactttttcgcatcggcgttaccctgatcgtcgaggaacatatcacgggtcgcgccagcaggcgccatttcacgaaaatcgatcgccgtggtagcgccatctttagtgcgcagcagcataaatcccccgccgcccagatttccggcttgcggatgcgtgacagccagcgcatagcccacggcgacggcggcatccacggcattaccgccctgctttaagatatccacgccaacctgcgtcgccattgcatccaccgaggccaccatcccttgcgtcgcccgcacaggatgaaagacatcttcttcaacaccataggagactggcggcgcgacgggaggattggccaccgcgctaaacgtccccccggccagcagagcggcgatcgccacccagcgcataaacgttggtttcatcgttgtttttctccagataaatgggtgtatgtcccgtttaatcctggcccacaacgcttaaaaaatcatcatcatggcgaaatagaggtacacttaaaaagaggcctcatcgggaggagacgacaatgaaacgcttactacttattacggctttgttaccctttgctgtattggcccagccaattaacactatgaataatcctaatcagccaggttatcagatccccagccagcagcgtatgcagacgcagatgcaaacgcagcagattcagcagcagggtatgttgaaacaacagatgcaaacgcaggcgcgcagccagcagcaaaatctacagtcgcagttgaatgccaatacgcagcgggttcagcagggacagccgggcaacggtatgctcggtcagcaaacgctgcccaatacgcagggcggaatgctcagcggcagtggaaatccggaccggatgctaaaccattcccagccaatgttgcagcaggacagcgggacgccgcagcctgacatcccgctgaaaaccatcagcccttaaaactgacggcccttaaaactgaaagtgagggccgatgtcatcaatgcgatcggtgcagatacaatccacgccccagcgcagcagctctgccgcccgctggggctgattgacggtatacaccagaatccgcagacccgcggctttaatctcttgcactcgcgtctcatcgagtaatttatggttgagatggagggaaacacagcccagacgggtcgtcagttcacgccagtcttcacgccatttatccagcagtaacccgcgcggcagttcaggtgctgccgcctgcgccgcttccagcgcctctatctcaaaggaagaaagcagcggcggcgtcatcccggcccacagttcgcgggcggccaacgccacgacgcgtcctgttagccttccgctccccgttgtcggtttgatctcaatattcgccatcatgccgtgtttacggcagcgctccgccacctgcgagagcagcggcagcggctcgcctttaaattcgccgctaaaccaaccgccagcgtccacacgcaataaatcctgccagttcaactcgcccgccacgccccaaccattgctggtgcgctccaggttatcgtcatgcagcaggaaaatttcgccgtctttcgacagcttggcatcaaactcaatcatggtgtgcccgtatcgcgcgcccacgtcaatcgccgccagagtgttttccggcgccagtttaccgccgccgcgatgggcgacaatgtggggataaggccagttactcatacacgttgtcctgtttcgccatcaaaaagatgtcgctgatgttccggcagatgcagccatagcgtactgcccgccgccgggcgctgctgatgcgccaaccgcaccaccagtttctgatcgccccagcgcccatgcgccagattatccgcgcccagaatctccagcgtatctaccgttagcggcacgccgccttccgcctgcgagcttaacgcaatatgctccggtcggatacccagcgtcatgttacgtccggcatgaccccgatagtccgcacctatcggtaacgccagaccgccaggcaattcgaaacggtcgccggaagcgctgataacgccatccaacaggttcatcgccgggctgccgataaagctcgccacgaagcgactggccggtttttcatatacctctaccggcgtgccaatctgttctgcgacgcctttattcatcaccatcacccgctgggccagcgtcatcgcctctacctgatcgtgagtaacatagagcgaggtggtacgaagacgacgatgcagatgttgtaactccagacgcatctgcacgcgcagcttggcgtcgaggttagagagcggttcgtcgaataaaaagactgccggctcgcggacgatcgcgcgccccattgccacgcgctgccgttgaccgccggaaagctcgcgtggacggcgtttaagcaggccgtccagctccagaatgcgcgccgcctcccgcacacgttcttcaatatgcgctttgctcataccacgaatttttagtccccacgccatgttctcctctacgctcatatggggatagagagcatagttctgaaataccatcgcgatgccgcgatctttgggctccatctcggtgacccgtttgcgatcaatccagatatcgccgctggtcacgcgttccagaccagccaccatccgcaacaacgttgatttgccgcagccggacggcccgaccatcacgataaattcgccatccgccacgtccagcgtcagcggttgaatgacctgggttttgccgtcccagcttttggttactgcctgtagttttaaaccagccattttatttctcactatcgaccaggccacgcacaaacgcgcgctgcatggctaacacaattacgaccggagggataagggtgagcagcattgccgccatcacctggttccattgcgtggtaccttcgccggtggcgatcatccctttgatacccgctacggcagtgccaagattcacgtcggtgataatcaacagcggccacagatactggttccagccgtagataaaggtgatgacgaataacgccgccaggttggtttttgacagcggcaacacgatgtcgcggaaaaagcgcatcggcgacgcgccgtcaatacgggccgcctccaccagttcatccggaagcgtcatgaagaactgacgaaacaggaaagtggcggtagcggacgccatcagcggtagcgtcagaccagcatagctgtcgagcattttcaggttggcgatcacttctaccgtcgggaagatacgcacttcaaccggcagcatcagggtgataaaaatcatccagaagaacaggttacgcaggggaaaacgaaaccagacgatggcgaatgcggaaagcatagataccgtgattttgcctaccgtaatgctgaacgccataatgaaactgttaagcatcatcagccagaatggcgcgctattaacaccgacgccgttgacccaaatagttttgatattctccagtaactgcgtgccgggaagcagcgtcatcggcgtctcaaacaccgcacggtcgtccagcgtcgccgcgacaaacgcgacatacagcggaaacaaaatgaccgcgatccccagaatcagcatggtatggctgaatattgtcagcccgcgacgattctctatcattggtaacgcaccttactttccacatagcggaactgcaccaccgtcagaatgatgacgaggaacatcaacactaccgactgcgcggcggacgccgagagatccaggccggtaaacccttcgcgataaatcttataaatcagcgtcgtagtggcttgtaccggcccgccggcggtcgcggcgtcgatcaccgggaaggtgtcgaaaaaggcgtacaccaggttgaccaccagcaggaagaaactgaccggcgcaataagcggcaaagaaagccggaagaaacgacgaatcggcccggcgccgtcaatggccgccgcttccaccagcgagcggggaatggattgcagcgcggcaaagaagaataaaaagttgtaactaatctgcttccagactgacgcaaataccaccaggaacatcgcctgaccgctgttttgcgcgtggttccagtcatagccgaattcgccaaggaaatgggtgattaatccccgccccgggttaaacaggaaaatccacaatacggcggcgacggcgggcgcgacggcataaggcagcagcatcagcgtctgataaaaacggctgccgcgcaccacgtaatccaccagggcggcgaaaaacagcgagaccagcaggccgctaaacgtgaccagcgcgctgaatttaatcgtcgtccagaaggcgtcgagataataactgtcgtgaaaaagcgcgacgaaattctccagcccgacaaattggctggaaaaaccaaacggatcgacgctttgcagcgaataccacagcgcttcgcccgcaggccagataaagaaaataacggtgataaccaactgcggggcaaccagtaaatacggcagccagcgcgagcggaacaccggacgggatgatgacatgaaggttcttttcctggaaggtgccggatggcggtgcatgcaccttatccggcacttatacacttaagatttgctcgctttctcaaaacgacgcagcaactgattcccgcgatccactgcggtatccaacgcctgttgtggggttttcttcccggtccagacgctttccagctcttcgtccacgatggtacgaatctgcggcatattgcccagacgcaagcctttggtgaagggtaacggcggcttattcaacatctggcgagtggcgatatccgcaccggggtttttatcgtaataaccctgctcgcgggtcagctcgtaggcggcggtggtaatcggcaggtagccggttttttgatgccattcagcagcgttttccggttttgccaggaagtcgaggaatttggcgacgccggtataggtttctttatctttaccctgcatgacccataggctggctccgccgataatggcgttttgcggcgcgcccttgatatcagcgtcgtacggcatcatacccacgccatagttaaatttggcatactggcggatattggcgagcgagccggaggacgcggttgtcatcgcgcagtcaccgttataaaacttctcggtagactcgtccttacgcccaacatagctaaaatcgcctttcttattcatctcttccagcagcgcgatatgtttcacctgctctggcttattaaactccagcaccgcatctgtaccgtcaaagccattgtttttactggcgaaggggagaccgttccaggcgctgaagttttccagttggatccagccttgccagccgctggcgtaaccgcatttcatgcctgccgctctcaatttcgcggtatagtcagccagctcctgccaggttttcggcggctgctccggatctaaaccggctttcttaaaggcgtctttgttgtagtacagtaccggcgtggagctgttaaagggctgggagagcagatgcccgcttttagcatcggtgtagtagcctgcaacggtcggtacaaactgggactcgtcaaagttaataccggcgtctttaaacacttcataaaccggcttaatggctttcgaggccatcatggtcgccgtcccaacctcataaacctgcaatattgccggcgcgttgccggtacggaatgccgcgatcccggcgctcaggttctgttcatagttccccttatagaccggaacgattttgtaatccggattggcctggttgaaacgttgcgccagtgaatcaacttctttgcctaactccccttccattgaatgccagaatggaatagtggtgacggccaacgcctgacccgtaaatgccagactcagcgccagtcctaaagctgtatgtcgtaacgatatcatcggttatctctctttttgtgccgggatgcgcgatatcacgcgttttatgttcgcgggggtaacatgacatgctcgaatgacagaaaaataacttttttattacaaaaaaaagatagtaaggcgacagagagatggcaaggcagcgaaagcgccggaaaagaaaagtgggagctacggcacggataggtacgacattattctcgggggcggcgcacatgccgtaacccaaccaggcggagcgtcgccgggattaacgtctcaggcacgtaagcgaacggcaatttgctccagcgtaagccgccctgccgccgcatcgactgtcatatcgacaaaatccggattcgcagcgagtgagatcccgttacgctttaaaaacagcagcgtaataaataaggcggtacgtttgttaccatcattgaagatatgcccacgggatatagcgagcaaatgcattgccgccagcagccacacgtcggtcaccccttcatattcgatttgcttgagtacccggtacattagcgcttccgcgcggccaggatcaggcatgcctgttacaccaggcgtaacgcggagaagcctgtcgtgaaactgaattatctcttccgctgagataagttgtagggtcatttatccgccagctccctgagctcattgccatgaaccgccataatggcagcaaactcatcatccattcgcgccgtctgataacgctcaaactcctcggcgctgatgatcactgcggacttatgcccacgacgcgtgatggtaacaggcccccccgtcaccgcactttccaggacttcggccagattttgccgcgcttcgctatagttaaccgtacgcataaacatctccccagttgtacatgtttattgtacaacaaacatgtacaaaaaaagagccatcaggctcttttgaaaaattttaccgcttgccgttaccgggggcggcgcacgcgcttcccccctggcacagtctaaccgcccagataggcgctgcgcaccgcttcgttcgccagcagtgcatcaccggtatcggatagcaccacgtggccgttttccagcacataaccgcggtcggcgagcttcagcgcctggttggcgttctgctcgacaaggaagatggtcataccctgctcgcgcaactgctcaatggtgtcgaagatctgctggatgatgatcggcgccagccccagcgacggttcatccagcagcaatagcctcggctggctcatcagcgcgcggccaatcgccagcatctgctgttcgccgccggacatggtgcccgctcgctggatacggcgctcatgcaggcgcggaaacagctcgtacacccatttgatacgctcctgaaaccgatcgcgctcggcaaaaaaaccgcccatcgccaggttctcttctaccgtcatccgcgagaagacgcgccgcccttccggcactatcgccaccgcttcacgcatgattttcgccgtctgccagtcggttatgtctttaccgtcaaacaccacccgtccgctggaggcgcgcggatcgccgcacaaggtgccaagcagcgtcgttttccccgcgccgttagcgccaatcagggtaacgatttccccctggttgatgtgcagactgacgtcgtgcagcgcctgaatcttgccgtagtgggcgctgactttttcaaacgttaacatcgttttttccatcttatgcctcacccagataagcgcggatgacgtccgggttgttgcggatctcttccggcgtgccgttcgccagcggcgtgccctggttcaccacgtaaatgcgatcggaaatgcccatcaccagcttcatatcgtgttcaatcagcaagatagtggtgttgtgatggttacgtagttcggcaatcagctcatccagctctttggtctctttcgggttaaggccagccgccggttcgtcgagcatcagaatttctggctgcgtcaccatgcagcgggcaatctccagccggcgctggtcgccgtaggccagattactggcctggcggttggcatgttccagcaggccaatacgctcaagccaggtcgccgcgcggtccagcgcttcgctttgcgcgcggcggaaagcgggcgttttcaacaggccggaaaagaggcccgttttcagttgctggtgctgcgccaccagcagattttcaatcaccgtcatttcgcgaaacaggcgcacatgctggaaagtgcgtaccacgcccatgcgggcgatctgctggcccggcaatccttccagatgccgctcgcgcaacgtgatcgtaccgcctgtcggcttataaaaaccggtcaggcagttaaacaccgtcgttttacccgcgccgttagggccaatcagcgacacaatttcccgctcacgcaattccagcgatacattgttgaccgccagcaaaccgccaaagcgcatcatcaggccgttaaccgctaataatggctgactcatgcctgctctcctttcgcctgaccacttttcagcttcaactgcggacgcgtcatcggcagcaatccctgcgggcgccagatcatcatcaacaccatcaaaccgccgagcatcaacatgctgtattcgttgaagtcgcgcatcaactcgcgcgacaccaccagcagaaccgccgccaggatcaccgcaaactgcgagcccattccgcccagcaccacaatcgccagcacgaaggcggattcggcgaaagtgaaggattccgggctgacaaagccctggcgggcggcaaacaacgtcccggcgaaaccggcaaacgcggcgctgatagtaaaagcggtcagcttgatgcgcgtcgggcttaaacctaatgagcgacaggcgatctcatcttcacgcaacgcttcccacgcccggcccagcggcatacgcagcaggcggttaatgacaaacagcgacaggaccaccagcaacagggccaccagatagaggaaaatgacccggtcggatgggtcgtacttcacgccaaagaaattgctgaaggtatcccagccgccttcgcgggtgctgcggctaaactccagaccaaacagcgtcggtttcgggatctggctgatgccgttcgggccgccggtaatttcagtgttgttgagcagcaggatacggacgatttcgccgaagccgagcgtcacaatcgccagatagtcgccgcgcagacgcagtaccgggaagccgagcaggaaaccagcagcggcggagaccagtcccgccagcggcaggcaggtccagaaacccaaaccataatagtggttgagcagcgcaaaggtataagcgccgatggcgtaaaagccgccgtagcccaataccagcagaccggacagccccaccaccacgttcagccccagaccgaggatgatataaatcatggtcatggtggcgatatcgacgctaccgcgcgacaccataaacggccatgccacggcgataaccagcagcgccatcagaaacagcttttgcttaacggtagagccatcgatcgccggcagaataaacttcggtccggagacgtgcttcaccgctttctggaacatcggacgcagcaactgaaagaaaaaaaccactgccgtaccgataaagatccactgccagcggatgtcggcggcggtatccaccaccagtttggtgccgtccagctccagttgtacgcccatgaagacgccagccagaacgaagaacatcgccgcagagaacagagccatcgcaatatgcatcggtttcatactttctctacctccggacgccccaggataccggtcggcatcaccagcagtaccagaatcagcagagcgaacgatacgacatctttatattcggtacttaaatatgcagacgagagcgcttcggcgacgcccaaaatcagaccgccgatcatcgcgcccggaatgctgccaatcccgcccagcaccgccgcggtgaacgctttcatcccggccataaaaccgatgtaggggttaattacgccatagaactgaccgagcagcacgcccgccaccgccgccattgccgcgccgataacaaacgttagcgcaatgacgcggtcggtattaatgccgagcaggctggccattttcagatcctccgcgcaggcgcggcaggcgcggcccatccgggagtagcgaatgaaaatggtgagcgccagcatagccagaaaggtgactatccagataaccgcctgcatggtggtgatggacgcggaaaagttttcgctgctgcccacaatccactggccgttaaacaggctgggtaacgccacgtcgcgcgaaccttccgtcaggctgacgtagttttgcaggaagatggacatcccgatggcggaaatcagggcaatcaggcgcttggagttgcgcacgggccggtaagcgactcgctcgatactccagccgtaggcgctggcaataataatcgcaccgataaatccagcggccaccaggagccaactggtgtctattcccatcatcattagcgcggcgatgatcataaaagagacgtagctgccgatcatatacacctcgccatgagcgaagttgatcatgccgataatgccgtacaccatcgtataaccgatagcaatcagcgcgtaggtgctccccagcgtgacgccgttaaacatctgctgcaagaaatagagaaactgctcggacataaggtaacctttttaaacccgcccggcgtgcgggcggtgggataacttatcttctggcattacttcgcgacggttgacgagccgtcggcgtgccactggaagacgccaaattcaaatcccttaagatcgcctttttcatcccatttcagcggcccaataacggtatcagccccgttagctttaagatctttcaccagatccagcggagcatggctggcgctacgcgtcattgcggtcgccagtgactggacggcggcgtaggtgatccagacgtacggaccgccgggatctttcttgtcggctttcagcgcttcgacaatcgctttattcgccgggtcctggtcataacgttttggcatcgtcaccaacatgccttccgccgcaccgcccgcaatattggacagcgacgcgttacctacgccttccggccccataaattgcgttttcaggccattagcccgcgcctggcgtagcatctgccccatttccgggtagtagccgccgtaatacacaaagtcgatattctctttttgcaagcgggcaatcagggcggagaaatctttttcgccagcggtaataccatcaaaaaagacaatattggcattgccctgcttcaggccatcctgcacggagcgcgccagtccttcgccgtattgctgtttatcgtgaatgatagcgatgcgctgcggtttcaccgtttccaggatgtatttcgcggctgttggcccctgggaggagtccaggccggcggtacgcataatgtactgatagccgcgctgggtcagctccgggttagtcgcccccggggagatcatcagaataccttcatcttcatagatatcggatgctggctgagtagaagaagaacacaagtgaccaataacgtactgaataccgtcgttaacgattttgttggccaccgccaccgcctgttttggatcgcaggcatcatcgtactctacgccgaccagcttatcgcctttaatcccgcctttcgcgttgatgtctttaatggcctggcgcgcgccgttaaattccatatcgccccattgcgctaccgggccggacatcgccccgactatggcgactttaatatcatctgccattgccccctgcgagactgctaatgcaacaatccctgcgattattgttttcgctttccgtttcatgtgcctgtatccccattcgtgatgttatatgttttgttttttgctggttaaaaagcagactgtactttttataaatggtgcgctttttactgactcattaatgagttagcgcagcatttaaagcataataagattaaaatctctatttttcagtctattaagaaaagataatattctgcttttcgctatagataaacaaaaaaagcatgcttgtcagcataaaataacggcatattaagcggaataattcactagcattcagggaattatgctgcctgttttccattctctaatgcttcaaactgtaattatcgttgttaaaaaattaataacctggtaaatgacacaaaaaagagaaagcatctggcctgcctgtttcggtacactgatcgcatcttttgaaatcgggacaagccgtcgatgaagctgaccattcttcgtttagaacactttagcgctcaggatcagatcgatctgggcaaaatctggccggaatattccgcctcctcattaagcgtagatgaaacgcaccggatttatgccgcgcggtttaatgagcgtttgttgggcgccgtaagagtgacgctgagcggaacgcagggcgcgctggattccttacgcgtgcgtgaaatcacccgtcgccgcggcgtcgggcaatacctggtagaagaagtcatccgcgataatcccaacgtctcgtcgtggtggatggcggatgtcggtgttgaagaccgcagcgtgatggccgcgtttatgcaggcgttaggttttaccgcccagcatgacggctgggagaagcgctaaaagaaagccggatggcgctgacgcttatccggcctacatgccgggagaaaagataaaaaccacctcgcaattttccaagaatttcgcgttgcaggcaggcggcaagttatgaaatccccgggagcttacataagtaagtgaccggggttgaataacgtagccaacgcacctgcaacgcgaaaggcgccagaaaatcacttagcgtctgtcgccgtaccattcgcatgccagtcaaacacgccgaactcaaatcctttcagatcgcctttctcatcccacgacagcggtcccattacggtgtcgaccgtggcgcctttcaggtatttggcgatttccgccggatcgtcggagtggttcaggcccgcctgcaacgattgcagcgcggcgtaggtggtccacacgaatgcgccgctaggatcttgtttcttggctttgatggcatccacaatcggtttgttcgccgggacctggtcgtagttcttcggtttggtgaccagtaagccttccgctgactctccggcgatgttagacagcgacacgttcgccaccccttccggccccataaactgggttttcagccctgcggcgcgggactggcgcaaaatctgccccatttccgggtgataaccgccgtagtagacaaagtcgatattctctttcttcaggcgcgcaaccagagtggagaaatctttttcgccagcggtgatgccgtcaaagaatacgacgttaacgccgcctttcttcagaccgtcctgcaccgcgcgcgccagcccttcgccgtactgctgcttatcgtggataatcgcgatgcgctgcggttttaccttctccagaatatactttgccgccgttggcccctggtcagagtccagaccggtggtgcgcaaaaccagcttatagccgcgcgcggtcagctccggcgcggtcgccgccggggttatcatcaggatgccttcgtcttcgtagatatcagacgctggctgtgtggaagaggaacataagtgaccgataacatacttgatgccgtcgttcaccactttgttagcgacagctaccgcctgtttcgggtcgcaggcgtcgtcatatttcaccgcgacgagcttatcgcctttaataccgcctttcgcattgatatcggcaattgcctgctccgcaccggtaaattcctggtcgccatactgcgccaccggaccggacatcgcgccgacaaccgcgactttaatgtcgtcggcgaatgccatatggcttaatgacagggcgatacatcctgccaataacgttttacccttcatattcatcctgataatccccattattctggttgttacgtgtgttgtggtgttattgttcagcactttatttcgattattggctagctacccgtgctttagcagcatactctgctaaaacatacccgatttttattattttggaatagctaaatttacatccagataacagatttgtgtcggtgggggagaggaagggtccgtaggcccgataagcgaagcgccatcgggcaaacgtattgccggatggcagcgtaaacgccttatccagcctacaaaaaacaaaacccccgaattcacattcgagggttcattggcaattcgcgaagattacgcttcgatcgcagcgcgaagctttttcatggcgttcttttcaagctggcgcacacgctcagcggagacgccgtaacgatcggccagctcctgcaacgtagacttattgtcttcgtccagccagcgagcgcggataatatcctggctacgctcgtcgagcccctgcatcgcgtcggtcagtcggttggcggcctgctcttcccagttatcgtcttcaatgccgtcggcaaagttagacgatttatcctgcagatacagcaccggcgccattggctggctgtcggactcatcgtccgaagacatgtcaaacgtcatgtcctgcgccgccatacgcgactccatctcacgcacgtctttactggaaacacccagttcgcgcgccaccatttcaacctcatcctgattaaaccagcccagacgctgcttggttttacgcagattaaagaacagcttacgctgcgctttcgtggttgcaactttaacgatacgccagttacgcagcacgtattcgtgaatttctgctttaatccagtgtacggcgaaagaaaccaggcgcacgcctacttccgggttaaaacgacgtacggctttcatcaggccgatgttgccttcctggatcaaatccgcctgcggcagaccatagcccgcatagttacgagcaatatgaacaacaaagcgcaggtgagacaggatcagcgttttagctgcttccagatcgccctggtaatgcagcctttcagccaatgcccgctcctcgtcagccgataacatcggccacgcgttcgccgcccggatataagattccaggttgccaacaggggctaaagctaaattttgcatttctttggtcattcaaatcctctcaatcagtattgcctggcaccgtcagcgagcaacaaccgtgccaaagccgatgagcaacgagaatatcacccactcttttatcagacagtgattttatccacaagttcaatgtaacactgtgcataatttgcacaaatcttgtgacataaagatgacgcgcggggaagagacaacagggactctttccctgcgaacggaagcccattgcagggaaagattataccacgattttatcaatcgggagtaaagtgacgtaaatgttgcaccgtggccagccaggcggcgatccagccaatcatggaacagaccagcagcagcaacaggcactcatcgaacgataagccattgagatcaaacttcgtgccgaagacctgcgccacttcagtcaccgccgatgataaacgcatcaccaaaatttcagacaatatcagtgacagaaacgcgccggaaaaaccgagcaacgcgccgccatagaggaacggacgcaggataaagccatcggtcgcgccaatcagcttttgcacgttaatggtgtcgcgacgggcaaaaatgctcaggcgcacgctgttgccgataacgaggaagaccgccgcgaccatcagcacgccgatcatcgccgatacgcggcccaccagcccggtgagcgccgccaggcgcgcaaaccagctatcatccatgcggacttcgtcaatgccgttaatctgcgagatacggtcgcgcagcgtattaagcgaggcggtactttgaaagtccagcttggggatcaccaccgccaccgccggtagcgggttctcttccagcatatccagcgcgccgccaaaacccgaccagttgcggaattctcccagcgcgtcctcacgggacaggtagttgaccttctcaacgccctgctcggcctgaagctgcccaacaacccgcgccgccgcgtcatcatccagcgttttttgcagataaacggtgatctgcggcgacggataatactgagtcgccgcctggttgacgttcttatagaccatgtaacagacgctgggcagcgtcagggagatggcgatcaccatcaccgtcagaaacgtcgccagcggtttgcttttcagatcttgcagcgcgccgtgccaggcatagcgcacctgctcattaaagacgttcgttttacgtgagttcggtttcggcgtcggcttctggcgtcctggcgcgttgcgcccgccgcctgttccgccgcgagacttacgcagtcgatccagccgtccgccgaactgcctgatttggttaatcgcgtcgcgcctattcattggccaggcctccatgcagatgtccatcgctcaggacgagctgcctataggaacgacgggagataagtccaatatcgtgcgtagccatcagtaccgtcacccctacgcggttaaactcttcaaacagacgtaaaatcccttccgacaacgcgtcgtccaagttcccggtcggttcatccgccagcaataccgctggcttattgaccaccgcgcgggcgatgcccacgcgctgctgttcgcctccggagagttgaatcgggaagtttctcgctttgtccagtagtccaaccttatccagcgccgccgacacacgacgacggatatcatcgccgctggcgccggcaatgattaacggtatcgccacattgtcatagaccgtgcgatccatcagcagatggtgatcctggaaaatcatcccaatctggcggcgcaaaaacggcacttcgcggtttttcaagcgcgtaatatcatgcccgctgaagaagattttgccggcgctgggccgctcaatcccacagattagcttcagcagggtacttttccccgcgccggagtggccggtcagaaacgccatctcgcctggccgcatatggaatgtcactccctgcagcgcttgtctcccgccgagataggccttgctgacatgttcaaagcgaatcattgttaatcctctcgggcaaaaagtgcctcaataaaatcgtccgccttaaacggacgcaaatcctcgatacgttcgcccacgccaatgtaacggataggaatgccaaactggtcagctaccgagaaaatcaccccgcctttcgccgtaccgtccagcttggtcagggtaataccggttaagcctaccgcttcatggaacagtttggcctggcttaccgcgttctgtccggtgctggcgtcaatggtcagcataacttcatgtggcgcttcttcgtccagctttttcatgacgcgaacgatttttttcagctcttccatcaggtgcgacttgttctgcagacgccctgccgtatcggcaattaacacatccacattacgcgccttcgcggcctggatagcgtcaaaaatcaccgaggcggagtccgcgccggtatgctgggcgataaccggaatattgttacgctgtccccagacctgtagctgttcgaccgccgccgcgcggaaagtatcccccgccgccagcatcactgatttaccctgctgctcaaactggcgcgccagtttaccgatagtggtggttttacccacgccgttcacgccaaccatcagaataacaaaaggcgttttaccttcaatattaagcggttcgtctaccttcgccagaatctcgcccatctcgtctttcaacagaccatacagcgcctcggcatctttaagctgtttgcggctggcgccttccgtcagattagcgataatcttacgcgtggtttccaccccgacatcagcgatgagcaactgctcttccagctcctcgaacaaatcatcgtcgattttcttgccgcggaacagactgataaatccggaaccgagattttctttggttttcagcagactgcgtttcaggcgggcaaagaaaccttctttagtcggtttttcctgttcctgaacgatcgcttccaccggcgcgtcttcttccgccggcggaacaaccatcaccgcctcttccgccgcctgagcggccagcgcctgcgcttccagctcttcgtcggtgaatttcgccgcgttttcgccctcttcttctaccgcggcaatgacctctacggtttccgcttcggcctgccactcttccggcgagatagcctcgtctttgacctcttccggcagcggcaattcctcgcgttccactgcgatctgcggcgctgccgtctcaatggccgccgcgggctccggctctaccggctgcggtttttcgctctcctgaactttctcagtaacgtccaccacctcttccgcaaaggcttctgtttctgctttgctgtgcgcgggcgtttgcgcgtctacgtctgccgccgtttcaacagggggctcaaccggtcgttgttcctcaacaatctgctgttcttcggtctgttcctgcttctgctctttatcaccgaagcccaaccaggaaaagaagccacgttttttctgttttgccatctgcgactacacccctcgcggcgctatatacatggaagctaaaaaaatgatgaaatagtctatcacttaacttaattcacatcaccgcctggaataacttgcaacaggcggttcgagcaagagaaatgaaaaaaccgactcactctggcagcggccaaatccgcattattggcgggcaatggcgtggccgtaaattaccggttccggacagcccgggtctgcgtcccaccaccgatcgcgtgcgcgaaacgttatttaactggctggctccggtaatggtagacgcccattgtctggattgctttgccggcagcggcgcgctgggtctggaagcgctatcacgttatgcggcccaggcaacgttactggaaatggatcgcgccgtatcgcagcagttgcaaaaaaatctggcgacgctgaaagccaacaatgctcgcgtcgtcaataccaatactctgaccttcctcagccagccggggacgccgcatcacgtcgtctttgtcgacccgccgtttcgtaaagggctgctggaagagacgttacaattgctggaaacccagggatggctggccgacgacgcgctaatctacgtagaaagcgaggtggaaaacggtctgccgcccgttccggcgaactgggcattgtatcgagaaaaggtggccggacaggtcgcttatcgtctgtatcagcgcgacgcgcaaggagaaaatgatgttgattaatctgggccgcttattaatgctcttcgtgtgggcatttttgattcttaatctggtgcatcccttcccgcgcccgctcaatatcttcgtcaacgtggcgttggtgttcatggcgctgatgcacggtatgcaactggcgctgctgaaatcaacgataccgaaagcgggtccgcagatgacgacgggagagaaaatccgcattttcctgttcggcgtgtttgagctgctggtctggcagaagaagtttaagaacaaaaaataacgtttgctgccggatgacggtttattcgttatccggggtacggctaacaaacccgacgaaccgcgttcccttatagctcagcgtaccttgatcgcccaccgtcaaagcgtggtactgctgcgcttgtaaacggaacgttttttccagaccgccattgagcggcttaaaactgacctcatagcgcatactggttcccgccgggatcacttcctgctggcgagagcgtcggtcattaaccggcttctcccgtttattgctgaccacgacctgcttttgctgtaacggcgccgcctcattagcggctttttcccgccgttgctgaacgaagcggaacgacgcggcaactacgattaatgcaatgattataatgaagaaaagcggtggcttactcatactgttaacctgtcagaaaatgcggaaataagcataccctgcccgttatagtgttgtcatctgaccgtcacggcctctacactgaataatagagccgcaagcataccgtttgcgaaaaaataacgaattcaaggaattaagatgctttggtcgtttatcgctgtctgcctgtccgcatggctgtatgtggacgcctcctatcgcgggccagcctggcaacgctgggtttttaagcccgtcacgttattactgttgctgttactggcctggcaagcgccgatgtttgacgccatcagttatcttgtgttggccggactgtgcgcctcgctggtcggcgatgcgttaacgctcttaccgcgtcaacgcctgctgtacgccgtcggggcatttttcttatcgcatctgctctacaccatttactttgccagccaaatgacgttgtcgttcttctggccgctgccgctggcgttactgatagtcggcgcgttgcttatcgccgttatctggacgcgactggaggagctacgctggccggtatgtacttttatcgccatgacgctggtcatggtctggctggcgggcgaactgtggttcttccgcccaacggcgccagccctttcggcctttaccggcgcgacgctgctgttcatcggcaatatcgtctggctgggtagccattaccgccgccgtttccgggcggataacgcgattgccgccgcctgctactttgcaggacacttcctgattgttcgctcgctgtacctgtaaataatagcgcttgactctggagtcgactccagagtgtatcctccggttaatgagaaaattatcatcaaccggaggacgttatgtcgacccctgataccgatggcaaaaaagtcccgccctttacctccttcagattagccccggcaatacagaaggccgatagctgctgctgcgaagaacattgcgcgtccagcgcgcctgtttctactgccatggcaggcacgcgctatacctggaaaatctccggcatggactgcgccgcctgcgcccgaaaagtggagaatgcggtacgccaaattcgcggcgtcaaccaggcgcaagtgctgttcgccaccgaaaagttagtggtcgatgccgacgccgaccttcgcgcgcaaattgaacacgccgtacagaaggcgggttataccttgcgtagtgaagattcgcgcgacgccgcacctgaatctcgtcttaaagagaacctgccgcttattacgctgatcattatgatggcgataagctgggggctggagcaatttaaccacccgttcggccaactggcctttatcgccaccaccctggtcggtctgtatcctattgcccgccaggcgctgcgactgatgaaaagcggcagttggttcgctattgaaacgctgatgagcgtcgccgccattggcgcgctgtttattggcgcgacggcggaggcggcaatggtattgctgctgttcctcatcggcgagcgcctggaaggatgggccgccagccgcgcccgtaaaggcgtcagcgcgttaatggcgcttaaaccggaaacggcgacccgtctgcgcgacggcgtacgggaagaggtcgctattaataccctgcgaccgggcgatattatcgaagtcgccgccggggggcgtttacccgccgacggtaaactggtttccggtttcgccagctttgatgaaagcgcgctcaccggcgagtctatcccggtggagcgcgcaacgggcgacaaagtcccggcaggcgcgaccagcgttgaccgtctcgtcaccctggaggtgctatctgaacctggcgccagcgcgattgaccgtatcctgacgctgattgaagaggcggaagagcgccgtgcgcccattgagcggtttattgaccgtttcagccgcatctatacgccagtcattatggtcatcgcgctgctggtgacgcttattccgccgctgatgttcgatggcggctggcaggagtggatttataaagggctgacgctgctgctcatcggttgcccgtgcgcgctggtgatctccacgcccgcggccattacctccgggctggcggcggcggcacggcgcggcgcattgattaaaggcggcgcagcgctggagcaactgggccgtatcacgcaggtcgcctttgataaaaccggtacgttgaccattggtaaaccacgggtgacggcgattcatccggcaagcggtatcagcgaagctgaactgttggcgctggcggcagccgtagaacaaggcgctacgcacccgctggcacaggctattgtccgcgaagcgcagacacgcgatctggcgatcccgacggcggaatcgcagcgaacgctggctggcaccgggattgaagcgcaggttaacggcgaacgtattctgatttgcgcggcgggaaaacagcctgcggcagcgtttgccgggcaaattagcgaactggaaaacgccgggcagacggtggttctggtgctgcgtaacgagaccgttgttggcgtcctcgccctccaggatacgttgcgtgacgatgcgcgcgacgccatccgcgatctgcatcagttaggcgttaacggcgtgattctgactggcgataacccacgggcggcggcagcgattgccggcgagctggatctggcgtttaaagccgggctactgccggaagacaaggtgcgggcagtcaccgcccttaaccaacaagcgccgctggccatggtgggcgacggcattaacgatgcgcccgcgatgaaagccgccagtatcggaattgctatgggcagcggtactgacgtcgcgctggaaacggctgacgccgcccttactcataaccgtctgcgcgggttagcgcagatgattacgctggcgcgcgctacccacgcgaatatccggcagaacatcaccattgcgctggggctgaaagctattttcctggtgacgacgctactgggttttaccgggctatggctggcaatcctggcggatacgggagccacggtattggtgaccgccaacgcgctacgtttgctgcgtaaaaactaatcttctcccgcccggcggcgtcgtgtcgccgggttatcccgcgatattcctttctttgttcatattattcacgcgaaaattatttattttctattacttatcaaaccattaatcagaaatagcgtgatttgatgtaaggttaatttttatccaaccgatattgatcataccgtctacaaaataaggaatgttaggcactatgaaaaatatcaaagtcatcaccggcgttatcgcgacgctgggcatatttagcgccttattgctggtgacaggaatactgttttattccgccgtcagcagcgatcggctgaatttccagaatgcgagcgcactgagttaccaacaacaggaactgggcggcagttttcagacattgatcgaaacccgcgtcaccattaaccgcgtggcgatacgcatgttaaaaaatcagcgcgatcccgcctcactggacgccatgaacacgctgttaaccaacgctggcgcgtcgctcaacgaagcggaaaaacatttcaacaactacgtgaactccgaagcgatcgcgggcaaagatccggcgttggatgcccaggccgaagccagctttaagcagatgtatgacgttttgcagcagtctatccactatcttaaagccgataattacgccgcctatggcaaccttgacgcgcaaaaagcgcaggatgacatggagcaggtatatgaccagtggctctctcaaaatgcgcaattaataaaattagccagcgatcagaatcagagcagctttacccagatgcaatggacgctggggataattctacttatcgtactcatcgtgctggcgtttatctggctggggctgcaacgcgttctactccgcccgctgcaacggattatggcgcacattcaaacgatcgccgacggcgatcttacccatgagatagaggctgaaggacgcagtgaaatgggccaactggccgccggtctcaaaacgatgcagcagtcgttaatccgtaccgtcagcgcggtgcgcgataacgcagactctatctatactggcgcaggcgaaatttccgccggcagcagcgacctctcttcccgtaccgaacagcaggcctcggcgctggaggagaccgccgccagcatggaacagttaaccgccacggtacggcaaaacaccgataacgcacgacaggcgacgggtctggcgaaaaccgcatcagaaaccgcgcgtaaaggaggacgcgtggtggataacgtagtgagcaccatgaacgatatcgccgaaagctcggaaaaaattgtggacatcaccagcgtgattgacggtatcgccttccagactaatatcctggcgctgaacgccgcggtagaagccgcccgcgccggcgaacaggggcgaggattcgcggtcgtggccggagaggtacgcacgttggccagccgtagcgcgcaggccgccaaagagatcaaagtactgattgaaaactccgtgtcgcgcattgataccggctctacgcaggtacgcgaagcgggagaaaccatgaaagagatcgtcaacgccgtgacccgcgtgaccgatattatgggcgaaatcgcctctgcctccgatgagcaaagcaaaggcattgagcaggtggcgcaggcggtatcggaaatggacagcgtgacgcagcaaaacgcctcgctggtagaagaatccgcagcagcggcggcggcgctggaagatcaggctaacgaacttcgtcaggcggtcgccgcgttccgcatccagaaacagcctcgtcgggaggcgtcgccaacgacgttaagcaaaggtttaacgccacagcccgccgcagaacaggcgaactgggaaagcttctaatcagaatagtatctgccgtgcagttaatgcgctttacgcaataaataacggtacggcagaccctccgtctcttgcgccagcaaatcgtgttccataaaggtacagaaccccggaatatcacgcgtcgtcgccggatcgtcggcgataatcagcaatgtttcgccagtttgcatgttgcgcaccgttttgcgcaccatcattaccggttcagggcaacgcagccccagggcgtcaagcgtatggtcaggggaggaaaacagatcgctcatcttcgtctcaatggtagaaaaacggcgatattttacgcccatcttcgtcagtaagccaggcaggttaacgattgcgtgaaaattagccattgcaatgccagcgcaaaacagtattatgcggcggttctttattgggttccctcaccccatccaacaaaaaggtcacaatatgactccgtttacacaatcacagcgcataaaagcgttgttctggctatcgctattccatttactggtgatcatttccagtaactatctggtgcagctccccatcactatttttggtttccacacgacctggggcgcgtttagttttccttttatttttctcgccaccgatcttaccgtgcgtatttttggcgcaccgctggcgcgccgcattatcttcgccgtcatgatccctgcgctgctggtgtcatatgtggtgtcatcgctgttctatatgggcgcctggcaaggtttcgccgcgctggcgaactttaatctgtttgtcgcccgtatcgccgccgccagctttatggcctacgcgctgggacagatccttgatgtccatgtgtttaaccgcctgcgccaaaatcgtcgctggtggctggcgccgaccgcttcaacgctgtttggcaatatcagcgatacccttgcctttttcttcattgcgttctggcgaagccccgatgcctttatggccgggcactggatggaaattgcgctggtggattattgctttaaggtgctcatcagcattattttcttcctgccgatgtacggcgttctactgaatatgttgctgaaaaagctggcagataaatctgaaatttccccattaccggcaagttaaaggttcgttttccgagttgtgataagatgagcgaatgagccgttatggccgtttatcgaaaggaagaagtcaatgcgcaatttggttaaatatgccggtattggcctgctggttatggggcttgcggcctgtgataacaacgatacaaaagcgtcggcagaaagcgccgccgcggaaagccaggcatccggtcagcccatcagcctgatggatggcaaactcagtttctcgctgccggcggatatgaccgatcaaagcggtaagctgggcacccaggcgaataatatgcacgtttattctgacccgacgggccagaaagcggtgattgttatcgtcggcgataataccgatgaagcgttgccggtgctggcaaaccgcctgcttgagcaacagcgtagccgcgacccgcagcttcaggtcgtcaccaataagtctattgagctcaaaggccatacgttgcaacaactggacagcattatctccgcgaagggccagacggcgtattcttccatcgtgctgggcaaagtggataaccaattgctgacgattcaggtcacgctgcctgcggacaatcagcaaaaagcgcaaaccacggctgaaaacatcatcaatacgttggttattaagtaacctttacgacgatgatgcggcctccggcagtgcagacggaggccgtttttttaagcgccaggtcagcaatagcgccatcgctaccagcccggccgccgccagataaatcaccggcacgcccgcccaggtcatcaccagccctgccagcggcccggtaacccccaaagacatatccataaagacggtataggtcgccagcgccgcaccctggttctgcggcggcacggctttgacggccaccacgcccagcgccggaaagaccagagaaaaacccatccccgtgagtaaaacgccgatttttgccatccacggcatggctgccgttcccaccagtaacagaccaataatctccacgccaaagcagatcatggcgacattcaacccgcctaaacgattgatgccgttagggaacagcaaacgcgtgccgacaaacgcgacgctaaataacgtgagcgcaaaagcggcgccatcccagcctttagcatcataaaataaggtaataaacgtcgcgatgacgccaaaccctgccgaggccagcgccaacgccataccatacagccagacacgccccagcaccgcgcgaaacggtagcggcttgcctttgttcgccttcaccgacggacgtggaagggctaacagtaccgccaacagcgccacgcccatcaccgttagcgccagtccctgtaacccgccccaggcataacacagcacgcccagcggcgcgcccatcgccattgcgccgtaggtgacgataccgttccaggagatgacccgaccaatatgcaacgacccgacgacgccgacgccccacagtgtcgaaccggtgccggcaaaactttgcccaatccctaaaatcacgcgacccagccccagtagcaacaaactgatcatcggccaggcgctggcgatatccgccagcaggtagccgagtccgcttaaaaaacagccgcataagccaaagacaacgatttttttcggccctaatacatccgcataccgcccggcatggggacggcttaacagagtggcgaagtattgcaggctgataataagccccgcccagaacgcgctgaatcccatcgcatcatgcacatagccgggcaagacggcgagcggcaggccgatggtcaggtagctggcaaagttaaacatcacaatggagacaatacgcagattgaggcgcaatccgtttagcgccggttcagcgacgggttcgggcatgagtatcaccgcatttttacaacatgttttcttttctatcatggcgcgcggtgaaaatcagtagtgagattcagattatcggtatcagggcagccgctacacttagaaaaaaacacaacaaggaaaacttcatggcaaccgctcaacccgacaaaacgggtatgcatattctgctgaaactggcctccctggttattattctcgccgggattcatgccgcggcggatattattgtacaactcttgctggcgctctttttcgccattgttcttaatccattagtgacctggtttattcgtcggggcgtgaagcgaccgctggcgattactatcgtggtggtcgtcatgctgatcgtgcttaccgcgctggtgggtgtgcttgccgcatcgcttaatgaatttatcgctatgctgcctaaatacagcaaggagctgacgcgtaaggtcttacaccttcaggagttaatgcccttcctgaatttacatatgtctccggaacgtatgctccgcgggatggattccgataaaatcatgctcttcaccacaacattaatgaccggcgtatcgggcgcgatggcaagcattgtgctgctggtgatgaccgtggtttttatgctgtttgaggtgcgtcacgtgccttataaattacgtttcgcgctaaacaatccacaaatccatattgccggcctgcaccgcgccctgaaaggcgtctcgcattatctggcgctgaaaacgctgctcagtttatggacgggcgcgattatctggctgggactggcgttaatgggtattcagtttgcgctaatgtggggcgtactggcctttttgctcaattacgttcctaatatcggctcggtgatttccgccgttccccccatgattcaggcgctgttatttaacggtttttacgagtgcgtactggtcggcgcgctctttttggtggtccatatggtgattggcaacattatggagccacgcatgatgggccatcgtctgggaatgtccacgctggtggtatttctttcgttattggtctggggatggctattaggcccggtcgggatgctcttgtccgttcctttgaccagcgtctgcaaaatctggatggaaaccactaaaggcggcagcaaactggcgatcttactggggccaggccgaccgaaaagccgtttaccgggatgaggcgacagatgctacaatctcctcttcttcataggcaacgttggtcctgatatgtaccaggtcgttctgggaaaagtgtcaacattaagcgcaggtcaattgcccgacgcgttaatcgctcaggcgccgcagggcgttcgccgggcaagctggctggccgggcgcgtgctgctttcccgtgcgctctcgccgctaccggagatggtgtatggcgaacagggtaaaccggctttttccgccggagcgccgctgtggtttaacctcagtcatagcggcgacactattgctctgttgcttagcgacgaaggtgaagtcggctgcgatattgaagtgatccgcccgcgcgataactggcgttcgctggcaaatgcggtattcagcctcggcgaacatgctgaaatggaagcggaacgtccggagcaacaactggcggcattctggcgtatctggacgcgtaaagaagccatcgtaaaacaacgcggcggcagcgcctggcaaatcgtcagcgtggacagcacgttgccctctgccttgtcggtcagccagtgtcagctcgatacgctcagtctggcagtctgtacccccacaccgtttacgctgacgccgcagacgataacgaaagcgctatgacacattaatttttccctctggcggcggacgtgtgttacaaaatgcggagcttcccatgcgccgacgcgccataccaaaaggtttaagtcagatgcaacgtgtcaccatcaccctcgatgacgatttactggaaacgctggacagcctgagccagcgacgcggctataacaatcgctccgaagcgatccgtgatattctgcgcggcgctctggcgcaggaggccactcaggaacacggcacacagggtttcgcggtactttcatatgtttatgaacatgagaaacgggatttagccagccgcatcgtctccacccagcatcatcatcatgatttatccgtcgccacgctgcacgtccatatcaaccacgatgactgtctggagatcgccgttctgaagggcgatatgggcgacgtacagcattttgccgatgatgttatcgcccagcgcggcgtgcgccacggccacttgcagtgtttgccgaaagaagactaacgccgggggcgcttcgcttgcccggcctacgttcgcacgtctgtcgtttgtaggccggatgaggcgcagccgccatccggcaataatgtttacgccattgtgccaatcgtttttctgaagcgtaacagcgctatcaggaagaacacgccgcctatcgccagcagggtcaggaactgcggccagacgatactcaaacctgcgccgcgataaagaatagcctgggcaaggctgacaaaatgcgtcgtcggcatggtcagcataatatcctgcaccgcctgcggcatactttcgcgcggcgtggaaccgccggagagcatttgtagcggcaacagcaccagaatcattaataaccccagctgcggcatcgaacgggcgatggtgcccataaaaatcccaattgaagtggtggcgaacaggctcagcgccacgcccaacataaacaatgggatcgatccttcaatcggtacgccaagtacgcctttcaccatcagcatcaaagacaaaccggaaaccaccagcacgaccagccccatcgaccacactttcgccatcatgatctcaaagggcgtgaccggcatcactaacagatgctctaccgtgccgtgttctcgctcgcggatcagcgccgacccggtcagcactatcgccagcatggtaatgttgttgataatcgccatcacgccgccaaaccacgccgggtcgagattcgggttaaagcgcatccgaatctccagcgacaccggctgaacgttatctccccgcgcgcgcgccacaaagctgttgacctcgccgctaataatattctggatataactgttgccggtaaacgcctggctcatgcgcgtcgcatcgacgttaacctgaatatcaggctgacgtccggccagcacatcacgctggaaattcggcggaatattgaccgcaaaggtatagcgtccggcatccagtccggcatccatttccgttgccgtaatcatctccggcggcagaaaccacgggcggtaaaaactattcacaatacggttcgacaactgcgactgatccatatcggcgatggcgataggggcaagatgcaacgaaccgggcaggacggtagcagaggagtaaaccgaaatcgtaaaggcgaagacgatcagcgccagcatcgctttgtcgcccagcagactgcgcagttctttgacgccgaggttataaatattacgtaatccgcgcattacccctcctgttttttcagcagcagaatgctcagacccatcaccaccgggacggcaatcagtaacggcataaataacggccagagatcggacagatccaacgctttggaaaacgtcccgcgcgcgatcgtcagaaaatgactggtcgggtagatctcgccgatccatcttcccggtccttccagcgaagccaccggatcgatcatgccggaaaattgtgttgccggaatgagggtaataatcgacgtcccaaaaatagcggcgatttggctcttcataaacgtggagatcagcagccccagaccggtggcgatgatgacataaagcagcgccgcgagggtaagcgtgagaaagctgcctttcagcggcacgccgaacacaaagaccgacagcgcgcacagtagcaagaagttcagcatacccagcgcgatatacggcagttgtttacccagcaaaaattcgctgcgcgtcgtcggcgttacgtacagattaatcatcgaccccagctctttctcccgcaccacgctcagggcgctaagcattgacgggatcatcatgagcagcagcggaatgaccgccggaacgatagcgggcagacttttcacatccgggttatagcgatagcgcgtttcaatattgagcagcccgacctgtttaaccgggttcggctgacgacttgccgcctcctgcagccagctttggtgcatcgcctgaacgtaccccttcaccgtctcggcgcggctgggcatggcgccatccacccagacgccaatctgcgctggcgtaccgcgagcaatatcgcggccaaaattaggcgggatctcaatggcaaccgccagctctcccgaacgcatccgccggtcaagctcgtcatagctggcgagcggcggctgttcgataaaatagcgggatcccgccagattgagcgaccatgcctgactactgacggtctggtcacgatcgaggacggcaaaacgcaggttctccacgtccatactgatgccatagcccataatcagcatcagaattaccgttcccagcagcgccagcgtcgagcgtaccggatcgcggcgtagctccagcgcttcgcggcgactgtagctgaacaaacgccggaagctcaatccctgccgcgacggtttacctgacgcggcgggcgtctgggatggcggtattggggtttcaggcgccgctcccgcagcttcctgtagccaggaaataaacgccgcctccagattggccgcgccccgctgttgcaccaattcctgcggcgtaccgctggcgagcactttaccggcgtgcatcaatgacattcggtcgcaacgttccgcttcgttcataaaatgggtcgagataaaaatcgtcaccttatcctgacgcgaaagatcgaccataagctgccagaacatatccctggcgaccggatcaacgccggacgttggctcatcaagaatcagcatttccgggcgatggatcaccgctaccgccagcgataaacgctggcggataccgagcggcaacgaagcggggagcgtatcttccacctccgttagcataaagcgttcgatcatctgcgcgacgcgcgccgggatctccgctggcggaatatgaaacaggcgggcatgaagttccagattctgccgcacggtgagttcgttatagagcgaaaaagcctgcgacatatacccgacccggcgacgggtgtcgatgtcgttcgggtctaccggctggccaaatagccaggcctggccttcgctggcgggaagcagaccggtcagcattttcatggtggtcgatttgccgcaaccgtttgaaccgaggaagccaaaaatctcgccgcgcggaatacggaaattaacatggtcaaccgcgacgaacttaccgaagcgcatggtcagatctttcgcctcaatggcaatctcttcctgctcagcgtgatacggcgggatcaccaccggcttatgcgcctggcgctgcgcttctggcaacagggcgataaacgcctgttccagcgtcgcgctatgggtttttgcccgcagttgctgcgcgctgccggttgccagtatctcgcccgcattcatcgccaccagccagtcaaaacgctccgcctcttccatataggccgttgcgaccaacacgctcatattggtctggcgctggcggatactgtcgattaagtcccagaactgagcgcgggagagcgggtccacgccggtggtaggctcatcaagaatcagcaattccgggtcatgaatcagagcacagcacaaccccagcttttgtttcatcccaccggacagcttcccggcaggacggtcacgaaacggcgccaggccggtgctgttcagcagctcggtaatacgcgcttcgcgttcagctttgtcatgaccaaagagacgagcgaaaaaatcgacgttctcataaaccgataacgtgtgataaaggtttttccccagcccctgcggcatccaggcgatgcgcggacagacgtcgcggcgatgtttcgcatcgcgcatatcgccgcccaggacgataacgttcccttgctcaatcacccgcgcgccagaaatcagcgacagcaggctcgacttacccaccccgtccggaccaatcagcccgaccatactacgggcgggaatgtccagcgtgatattgttcagcgcgaccgtttttccgtaatgctggctcaccccctcaagctgcgccacgggaggaacaggcaccagcgtcagcgacgtcattgcgacagcctcacgcttagagcgtcaggccagggcacgcgctcatccagacgaacccaggccattcccggcaaaccggttttgacatattccagatgctgtcgcagcagctctggcggaatacgcgctttgacgcggaacatcagcttcagccgttcatcgtgggtttccacggttttgggcgtgaactgcgccacgctggcgacaaaactgatcgtcgccggaatacgcagatccggcgcggcgtccagcaccagtcgcgcttcgccgccgatcttcaacaacccagcctgttcggtcggcaggaaaaatgtcatataaacgtcgctgagatcgaccatgttcaacacccggccgccagccgataacacttcgcccggctccgcaacgcggtactgcacgcgtccatcgcgcggcgcttttaattcgctgtcgtcgatgtcggcgacaatacgccgctcggtcgcctgcgccgcttccacgcgcgtttgcgcctggataatactggtacgcgccgcctcaatcgccgcttttgccgcagatacctgcgctttggcggtctccagggcggcgcgcgcgctttccgccgccgcgcgatcgtcatctaactgttgtacagataccgcgccacgctgcgacagcgaacgggaacgcacgtgacgtttagagacggagtccagctcagcttcccgctgtttgacgaccgactgcgcggcgcgcatttcactctggcgttgctccagcaaggcacgggcggcggcaaccgcgctttcggcctctttaatctgcgcaatcgcctccagccgctgctcctgcagcacgcgggtatccattttcgccagcacctcgccctgacgaacgaactgcccttccgaaacgaggatggtatcaatacgcccggcaatcttagtggcaatatccacttcggtggcttcaattctgccgttgctggcggcaaacccctccggtattcccgcagggcgcagcatccaccaggctatcgcggccaccgccacaagaatccccgctccccaccacaccagatgacgcttcattttgtccataatcgacccgccgtaatccctgttgtctaaccatgcgtgtcacaaagtccgccgggcgtgcgctcagcgggggtttccattcgggataagaatgaaaaaagaaaaggggccagacgacgaacagacgccgatgaagcgctcgccgtcaaagggagtgaatgatgtaggtacccggaaaagagggagtaatgttgtcatcatcagcgttcctggccgtaaatgaaacacgcatactcataactgctataaatcgatactaacacctctgtccgggatgtctattcgcttattgtttgtaatggtacttagcgttttgccgccaaatcctgcgcacaggcccaggcgctcgaccaggcccactggaagttatagccgcccaaccagccggtgacgtccatcacttcgccaataaaatagagacccggcacgcggcgcgcttccatagtccgcgatgatagttcgtttgtatccacgccgcccagcgtcacttccgctgtccgatagccttcggtgccgttaggctgcacttgccaggccgtaagcgtgtcaaccaacgcctgctggtcacgaacgttcaactgcctgagcgatacatccgggatctgccccaactgttgtaaacactccaccaaccgtttcggcagatgcatcgccagcgtgttcttcagactctggttcgggtgcgcgttacgctgttcattgagaacgtcttccagcgagagatccggcaataagttaatgctcactaactcgcccggttgccagtagctggaaatctgtaaaacggcggggccggacagcccacgatgggtaaaaagtaggttttcccgaaataccgtgccattgcgggcggtaatcacgcagggcacagagacgccagacagcgtctggagctgttctaacagcggcttatgtagcgtaaagggcaccagcccggcgcgcgtcggcaacactctgagaccaaactgttcggcgattttatagccaaacggcgatgcgccaagccccggcatcgacaggccgccgctggcaatcaccagcttttgcgtagtcaccgtctcgccgttcaacgccagtatgaaacccgactcatcacgctcgacgctcaatacctcgctacgcaggcgcatcgttacgccgcctttgtcgcactcggcaaccagcatatcgacaatgcgttgggcggaatcatcgcaaaaaagctgtcccagcgttttctcatgccaggctatcccatacctgtcgaccagatcgataaaatcccactgggtatagcgggctaacgctgatttacaaaaatgggggttctggctcaaatacgcagcaggctcaacataaagattagtaaagttgcagcgcccaccgccggacatgaggattttacgtcctggcttcttgccattatcgatgagcagcacgcggctacccgcctgtcctgcctgcgcggcgcaaaacatgcccgctgcgccagcgcctataataacggcatcaaacctttccacgtcgccttcctctctcaaattcgggcgggaattgtaaagtttcctcagtggtcgcaccagcgcgaaaagcgcctgaaaatggtatttatctgaaatatataagataattctttagtgatatcaaacaaagcacgaagtacatcaaaaaaagtctatatttcactttgcccgcgccgccaaagtcactgataatgcgccgcgttcatgtcctcaaaatggcgtaacgtcctatgctacatttgtttgctggcctggatttacataccgggcttttattattgcttgctctggcttttgtgctgttctacgaagcgattaacggcttccatgacacagccaatgcagtcgcaaccgtgatttacacccgtgcgatgcgttcgcagctggcggttgtcatggcggcggtgtttaacttttttggcgttttgctggggggtctcagcgtggcgtatgccattgtgcatatgctaccgacggatctcctgctcaacatgggttccgcgcacggcctcgctatggtcttttccatgttgctggcggcgattatctggaacctcggtacctggtatttcgggttgccggcgtccagttcccacacgctgattggcgccattatcggcatcggtttaaccaatgcgatgatgaccggcacgtcagtggtggatgcgcttaacatcccgaaagttatcaatattttcggttcactcattatctcccctattgtcggtctggtattcgccggcggtctgattttcttgctgcgccgctactggagcggtactaagaaacgcgcccgtatccacctgacgccagccgaacgtgaaaagaaagacggcaagaaaaagccgccgttctggacgcgtatcgcgctgatcctctccgctatcggcgtggcgttttcgcatggcgcgaacgatggtcagaaaggcattggcctggtcatgctggtgctgattggcgtcgcgcctgcgggtttcgtggtcaatatgaatgcctccagctacgaaatcacccgtacgcgcgatgctatcaacaatgtcgaaacgtactttgagcagcgtcctgacctgctgaaagccgtcaccggcgttgaccaactgattccctctccggaaccgggcgcgactgaaccgactgaattccactgccatccggctaacaccattaacgcgcttaaccgtgcgaaagggatgctggcaaacgtggaaagctacgacaagttaagcgttgaacagcgtagtcagttgcgtcgcattatgctgtgcatttccgacacgaccgacaaagtcgtgaaattgcctggcgtaagcagcgatgaccagcgcctgctgaaaaagctgaagaccgatatgttaagcaccattgagtatgcgccagtgtggatcattatggcagtggcgttggcgctgggtattggtacgatgatcggctggcgtcgcgtggcgaccactatcggcgagaaaattggtaaaaaaggcatgacgtatgcgcagggaatgtcggcgcagatgacggcggcagtctctatcggtcttgccagctacaccggtatgccagtttctaccactcacgtactctcctcttcagtggcgggaaccatggtcgttgatggcggcgggttgcagcgtaaaaccgtgaccagcattctgatggcctgggtatttacgttaccggcggcgattattctttccggcgtgctgtactggctttccctgaagattatttaagccaaatgggccggatagcgctgtcgctaatccggcctgtcaggatgaaacgacacaggcctgataggccgctataagcggcgtcatccggaggcttatctaatacgagcgggtcaggaaactggcccgctttttttattcagtgccaaatcatgagcgcaatcaagctcaccaccaccaaaccgcataacgcgctggtcagcagaaactggcggcgcacgcgttcacaacggcgaataaattcttcatcatgatgatcgcgatagcgctgagcgtagatataccataccaggcgcacctgtttgttgggctgaccatgcgtggtaaagaagccgccgccatcgacatattgatagagcaaaggatcgcaaccacgaagtaccactaacagtgcgcgtagcgatgagaaatagcgcgccatattaacaatgcaaacgacacataaagcccagaatagtgagacggtgcttatcatatctcctccccggcgacccgcccacggagttcctctccgggactaccgctccccgataccctgccagacaatcagtgaaagagtactacgaaagccgtccatattagcgctccgcattcgaacggctcttatacacattgtaggagatcagttaatttttttaccagaaggttaatcactatcaatgcaattccctagaaattttgtttaactaactggcaagcaaggcagattgacggattatcctggtcgctataatgtaaggatagttatggtaaacggctgagctagccccgcgcatagagttcgcaggacgcgggtgacgcggcggcataagaaacgccagtagctcaatggtcatcgacaacttatggaaggagtaacactatggcttataaacacattcttatcgcagttgatctctccccggaaagtaaagttctggttgaaaaagcggtctctatggcgcgcccctacaacgcgaaaatctccctcatccacgttgatgtgaactattctgacctgtacaccggtctgattgacgtcaatctgggcgatatgcagaaacgtatctccgaagaaacccaccacgcgctgaccgagctgtctaccaacgctggctaccctatcactgaaaccctgagcggtagcggcgatttgggccaggtgctggttgatgccatcaagaaatacgatatggatctggtcgtttgcggtcatcaccaggacttctggagcaaactgatgtcttctgcgcgccagctgatcaacaccgttcacgttgacatgctgattgtgccgctgcgcgacgaagaagagtaatacttgccgtgccggctggcggctaagaccgcgtctggtctatagtcaatcaggttggcctgaaccatcaggcaaattccggctatcaacaacaacgcccgcttatgtgggcgttttgtttatccccccttcttcgcagtactcagtacatcattccatcacaccaaacataattagtgtgatccactaattagtttgcgtatcatttgtataataacctattgatcaggctaataaccgcagtctatatcagggtaagtcttttcggcgcgttttgatatacgcgctcatacgtttcgggatggcattaaaaggcgaaggaatatgaatacaactgcacctacgggcttgctgcagcaacctcgtccattcttcatgatcttttttgtagaattatgggaacgatttggctattacggcgtccagggcatcctggcggtctttttcgttaaacaattgggtttttctcaggaacaggcctttattacctttggcgcttttgcagcactggtttatggcctgatctccatcggcggctatgttggcgaccatctgttagggactaaacgcaccctggtcctgggcgcaattgtgctggcgattggctattttatgaccggcatgtcgctattaaatcccgatctgatttttatcgcactgggtacgattgccgtgggcaacgggttatttaaagccaatcccgccagcctgctctctaaatgctatcagcctaaagatccccggctggatggcgctttcaccctgttttatatgtcgattaacatcggttctttgttatcgctatcgctggcgccggtgattgccgataaatttggctatgcggtgacctataatctgtgcggcgctggtttaattgttgcgcttctggtgtacttcgcctgccgtggcatggtgaaaaatatcggttctgaaccggatcataaaccgctacgttttcgcaatttgctgctggtactactcggcaccgtcgtcatgattttcctctgcgcctggctgatgcacaacgttaagattgccaatctggtgctcatcgtcctttctatcgtcgtcactattttcttctttcgcgaagcgtttcgtctggataaaaccggccgcaataaaatgttcgtggcgtttattctgatgattgaagccgtgctgttttacattctgtatgcgcagatgcctacctcgctgaacttctttgcgattaataacgtgcatcatgaaattcttggattcgccattaacccggtgagttttcaggcgctgaacccattctgggtggtcgtcgccagtccggtactggcagcgatttacacccggctgggtagcaaaggcaaagatctgactatgccgatgaagtttacgctcggcatgttcctctgcgcgctgggttttctgaccgccgccgccgccgggatgtggtttgccgatgcgcaaggattgacgtcgccgtggtttatcgtgctggtgtatctgttccagagtctgggcgagttgttgattagcgcgctggggctggcaatggtcgccgctctggtgccgcagcatctgatgggctttattctgggaatgtggttcctgacccaggccgccgccttcctgctcggcggttatgtggcgaccttcactgccgtaccggaaaacatcaccgatccgttgcagacgctgcccatttataccggcgtctttagcaaaattggtctggtaacgctggcggtcaccgtggtgatggccattatggtgccgtggttaaaccgaatgattaatacgccaggtaccgaacagtaatactcagtgccggatgcggcttacgccttatccagcctacaaataattgagaatcgtaggcccgataagcgtagctccatcgggcaatccgttactccgtcagaggggttccggcataaatatcaaaccgatgccctttggtgacgatggcgttgggcgtcgcgacatccgccagcggcggcgcataatcgggacgtttaaccaccacgcgtttggtcgccaactgacgcgccggttccagcagtccgtcggcgtctaaatccggccccaccaacgactgaaacacccgcatctctttcttcaccagcgcgcttttctgccggtgaggaaacatcggatcgaggtagaccacctgcgggcgcggcgtgatatcggtcaacgccgtcaggctggaagcatgaatcaactgcaaacgctcctgaagccagccgccaatgtccgcatcggcgtagccgcgcgtcagaccgtcatcgagcagcgcggcaaccaccgggttacgctccagcatccgcacgcggcaaccgacggacgccagcacaaacgcatcgcgccccagtccggccgtggcatcaaccacatccggcaggtaatcgcctttgataccgacggctttcgccaccgcttcgccgcgcccgccgccgaacttgcgccggtgcgccatcgcgccgccgacaaaatcgacgaaaataccgccgagcttcggttcgtcgcgcttgcgcagctccagatgttgcggcgtcatcaccagcgccatcgggttgtcttcgtcatgctccagtccccagcgggcagccagaacagataaggcgccgtctgtggcgcccgtttcatccattaagcagatttgcacgtaaaatcagcctttaatcccgtaatgctccagcatcgcgtccagttgtggttcacggccacggaagcgtttaaagagttccatcggctcttcagaaccaccgcgagtcaggatgttatcaaggaacgactgaccggtctcacggttgaaaatgccttcctcctcaaagcgggaataagcgtccgccgccagtacgtcggcccacagatagctgtagtagcctgccgcatagccgccagcaaagatatggctgaacgcatgtggaaagcgaccccatgtcggtgacggcaccacggcgacctgttttttaatttcaaagagcgtctcaagaattttcgctccttgctgtggattaaattccgcatgcagacggaaatcaaacagaccgaactccagctgacgcagaataaacagcgccgcctgatagtttttcgccgccagcattttatccagcagttccttcggcagcggttcgccggtctcatagtggccggagataaacgccagcgcttccggctcccagcaccagttttccataaactgacttggcagttcgaccgcgtcccacggcacgccgctgataccggagaccccggcggtctcaatgcgggtcagcatatgatgcaggccatgaccaaactcgtggaacagggtgatcacttcgtcatgggtaaacagagcgggtttaccgttcaccggacggttgaaattacaggtcagataagcgaccggcttttgcaatgtgccgtccgctttacgcatctggccgacacagtcgtccatccacgccccgccgcgtttgtgttcgcgcgcgtacaggtcaaggtagaagctgccgcgcagctcgttattttcgtcatacagttcaaagaaacgcacttccgggtgccagacatcaacgtcagtacgctctttggcagtgatgccgtaaatacgtttcaccacttcaaacaggccattcacggctttgttttccgggaagtacggacgtagctgctcatcgctgatgctgtacaggtgctgtttttgcttttcactgtagtacgcgatatcccacggttgcagctcctcaacgccaaattcggctttggcgaaggcgcgcagctgggccagctctttttccccctgcggacgggcgcgtttcgccaaatcggttaagaaatcgagcacctgctgcggattttccgccattttggtggccagcgattcatgggcataattttcgaagcccagcagttgcgccagttcatggcgcagcgcaagaatttcttccatcaccgggctgttatcccacttaccggcgttcggcccctgatcggaggcgcgagtggaataggcgcgatacatctcttcgcgcaacgcctggttgtcgcagtaggtcatgaccggcagatagctcgggatatccagggtcagcaggtaaccttcctgctctttggcttccgcctgggctttagctgccgccagagcgctttccggcattcccgccagctcggcttcatcggtgatgagcttcgtccagcccatagtggcatcgagcacattattgctgtactggttgcccagctcagacaggcgagtggcgatttcgccgtaacgctgctgtttctctttcggcaggccgatgccggacagttcaaaatcacgcagcgcgttatcaaccgctttcttctgcgcggtattcagagtggcgtaatgatcgccgtcgcgcaggtcgcggtacgcgttgtacaacccttcatgctggccaacccaggtgctgtattccgacagcagcggcagcgtctgttcgtaggcttcacgcagctccggactatttttcaccgagtttaagtggctaattggcgagaaaatacgccccagaacatcgtcggcttccgccaacggctggcagaggttttcccagctatacggcgcgccatgcgccacaacgccttctaccgccgcccggcaatcggccaacgctttggtgaccgcaggcaccacatgctccggtttaattgcagaaaaaggcggcagtgaaaaagacgttagtaatggattggtcatatgcgcagtcctgtagaagaaggtgagtggagcgcgcttttggcgctctcgcgatgagatctagaatgggggatagtaaggggaatttcaatgatggacagcgtacagacgtgggtatcgctgcaataagccgcccctttaacatcatcccggcttacgttttataagccgggtgacaacgtcagcgcgtttttctcgccatctcgtaagcagcggacagatccagacgctgccagaactgttgatcctcggtctcgcccgacaacggatatcctgccggtaacgccgtctcttccattaacgcctgacgctgcgctggcgacaggttcggcagcgctgtctgtagcagaacatcggcgccttttggtattttcaacggctgatgctcgcctttctgttgcggcaggttataagtcatggtgaagcggtagaaggtatgcatggccggatcgcggtacggatcgtcttttccggtcgatgccgcgcattcgacaatcgtcgtaccgcactctttcaccagcgcctcacgcagttgagcgcgagcttcgttgaataacgtacggtaatacggatcgttaagataatgcgcgacattacgctgcgcgaccatccgcgcgcccatcacatccagcggatagtgtacgccaaggaccaggcgagaatagccataacgcgcgccacgaatcaccagcgcatcaaagcgttccgggatcatttccgccatcaacagcgcatccgtataaccggtattcgtgtgtccgctggggaaagcaccgccacctgcggtataaggatgaccatcttttaccaccacatcatccggcgtcaaatggatagtattacccggcacctggtaaggacgcgggtaatgaaaatattttttcgccgcgccggtgctgacttccgaggctttaatcaacgccgccgctttgcccaactcacctttatcataagcggcgagaaatgcccgccccagccgcggccccattgcgtcgctcaggaaatagagatactccacgctttccgcatccgccagcgcctggtgacgggtattaacatcggcatcgtgattaatcgccgtcaccgtcgccagattgtctttcaatactgcttccggcaatgtattgaaggcggaaagtagggtaatccccatctgttgattctcagtagtatgaaaatcataaccgctagcctgtaaccaggcattatccgcctggatggaattctgtcgcatctgagccagggcgtcgcgagtcaacgcggcggtatcgccttgtaatgccttacgcaactgtgtcagccattgagcctcaaggtcattaaaggcgacgctcgccgagtcgggcgtcacgcttttcgctatcgactccgcctgggacaggggaatatctttcgccagtgccggcatcgccagcgccagagatgacgccagtacagtaatgtgtagtttcattatggttcctttcattaaaaataacgccaggtcaaaactactaccttgcccacaggcgatgctggcctgcgcagttgacggtttgatgatacgaacacgtcttgcaatactttcacaacgcgcgaaacaacatggcggtactggggtaatctctacggatctgcggtaaactatcggctaacttgtttacttcccggaatatctgcatccatgctcagttatcgtcacagctttcacgctggcaaccacgccgacgtccttaaacataccgttcagagcctgatcatcgagtcgctaaaagagaaagaaaaaccgtttctctatctggacacgcacgcgggcgcggggcgttatcagttgggcagcgaacatgctgaacgtaccggagagtatctggaaggcatcgcccgtatctggcagcaggacgatctgcccgccgaactggaaccgtatattagcgtcgtaaaacatttcaaccgcagcgggcagttacgctactatccgggctctccgttaatcgcccgccagttgctgcgtgagcaggacagtctgcaactcacggaattgcatcccagcgacttcccactgttgcgcgcggagtttcaaaaagacaaccgcgcccgcgtggaacgcgctgacggctatcagcaactgaaagccaaattgccgccggtttcccgccgcggtctgatcctcattgacccgccttatgaaatgaaaaccgactaccaggcggtagtcagcggcatcagcgagggttataaacgtttcgccaccgggacatacgcgctatggtatccggtggtgctccgccagcaaattaagcgcatgattcatgagctggaggccaccggcatccgtaaaatcctgcaaattgagctggcgatccgcccggacagcgatcagcgcgggatgacggcgtccggtatgatcgtggttaacccgccgtggaaactggagcagcagatgaacaacgtgctaccgtggctgcacagcaggttggcgccaaacggtcacggacacacttcggtaagctggatcgtgccggagtaatcacagccatcggtggaacctttcaccttcaggtatacaatcgcgaatattttggcgggtagcgcagaatctatccgtccgacaacgaacataaaggagcggtcatgaccaaacactatgattacatcgctatcggcggcggcagcggcggtatcgcctcgattaaccgcgccgctatgtacggccagaaatgcgcgctcatcgaagccaaagagctgggcggcacctgtgttaacgtgggctgcgtgccgaagaaagtgatgtggcatgccgcgcagattcgtgaagcgattcatctgtatggcccggactacggttttgacaccacgattaatcagttcgactggagcaagctgattgccagccgtaccgcgtatattgaccgcatccatacttcatacgacaacgtgctgggcaaaaataacgtggatgtgattaaaggctttgcccgctttgtcgatgccaaaaccattgaagtgaacggcgaaaccatcaccgccgaccatattttgatcgctaccggcggccgtccgagccatcctgagattccaggcgtggaatacggcattgattccgacggtttctttgcgctatctgccttgccggagcgcgtcgcggtggtaggcgcaggttatatcgccgttgaactggctggcgttatcaacgcgctgggggcgaaaacgcatctgtttgtccgtaaacatgcgccgctgcgcagttttgacccgatgattagcgaaacgctggttgaggtgatgaacgccgaaggcccgcaactgcatactcacgccgtgccgaaagcggtggtgaaaaacgccgacggcagtctgactctggaactggaagatggccgcagtgaaaccgttgattgcctgatctgggccattggtcgcgaaccgtcgaccgacaatattaatctggcggcagcgggcgtgaaaaccaatgaaaaaggttacatcattgtcgataaattccagaataccaacgttgaaggcatttacgccgttggcgacaatactggcgcggtagaactaacgccagtcgccgtcgccgccggtcgccgtctctccgagcgcctgtttaacaacaagccggaagagcatctggactacagcaacatcccgaccgtggtctttagccatccgcctatcggcaccgtcgggttaagcgagccgcaggcgcgcgagcagtacggcgacgagcaggtgaaagtctataaatcatcgtttaccgctatgtataccgcggtaacgacacaccgccagccgtgccgtatgaagctggtctgcgtcgggccggaagaaaaaattgtgggtatccacggtatcggcttcggcatggatgaaatgttgcagggcttcgcagtggcgctgaagatgggcgctaccaagaaagacttcgataataccgtcgctattcacccgaccgcatcggaagagtttgtgaccatgcgttaatatcttgtgcgcccatcttcaagggtgggcgcacaagcctgcatgattaatacgtactgaaataactctggatcagttccggattacgcgtctgagttaatgccgtcatcagcaagactcgcgccttcgccgggttgagcgagtcagacaccagccctggctgccctttatccaacggtacgacgccgtttccggtgcgggaagcgcgcaccacgataatcccggctttctccgcttttttaatccccgcgtcgctgcgtaccgagaccgaacctgcgccggttccggcataaataataccgtccgcgtgatgggcgatcgccgcatcatacatatattccgggtcgtcctgatagccgtaaataatcaccacattgggtaattttttgatattacgtacgtcaaaaacagatcgcagggtatgaattttttccacccgcgtttcgaactgtggctgaccattaacgatgacccccagatagccctcttccggcgctttaaaggtatccagagtcgtggcattagttttcgtcacaaagcgcgccgaaccaatacgatcgtttaaaaccaccatcacaccgcgtcccttcgcattcgggtcagcagccaccgtgaccgcttccagcaggttcattgcgccatcggcgctgattgccgacgcgggccgcattgcagcggtaaacaccaccggtttgtcgcttttcacggtcaaattaagaaagtaggcggtttcatcgagcgtgtcagtgccatgagtaataaccacaccgtcaacatcgtcccgcgccaataacgcattcaccttctgtgaaagtttcaggatgatatcgctggtcatattttcgctaccaatattcgccacctgctcgccgtcaacgcgagcgatattattcatttccggcacggcatttattaatgtttgcacgccaagttcaccagatttatatccggcggtttgcgtattattggctgccgtcccggcgatagtaccacctgtcgcgagaataacaatatgcggtagtgacgttgtgctaaatacacagtggctgatgagcagcaacacggtggccatgaaaactctaattttcattttcttcctctgaattaaaaataataagtggcgtgtgctataaaaacatgaataacaatcaggccagaaccatttttcctattaacagcccgacaatgaccgagacaatcacgttaactaatcccggacgcataaaactatggttaagcacatatttgccaatacgcgtcgtaccggtatcgtcaaacgccagcgccgccagacactgccccgccaccggaataaagaaatagccgttaacggcaggccaggagccgattaatgcataagcgggcaaccctaacgccagccccagcggcaacagaattaacgtcgttgccgcctggctgctgaccatagcggacacaaaaaacatcataatggcgataagccaggtatgctgttgcaatagagtttgcacttctgccttaatcaacgcgatatgaccattcacgaacgtctcactcatccaggccaggccgaaggcgcagacaatcgccagcgcgcccgcccgaaataccgtaccgctgataatttgatcgacctgcggtcggcataacaacacaatcaggcaggcaaaagagagcatcgtaatctggatagcggcggacatcgaaagcggttgtagccctttcgctgtttccaccatgggccgcagcgccggaatcagtcctaacagaacgataacgatcgcactggtcagaaataacgccaccgacaatttggcgcgcgaagtgaccaccgtatttttactttctttctgcgcaggtttaattaacccttcagcaagccgacgttgatattccggatcgtcttttaactcttttcctttattaaaggtcgctattgcccccatcgctacgccgattaacgtggcgggcacgcaaatcatcataatggttgaaatagagacgcccaacggcgccattaaaccaatcatcgccgccatggcggcagatataggactggcggtgatcgcctgttgcgatgcgataacggaaatagataaaggacgttccggtcgaatacctgaatcccgtgcgacttcagaaataaccggtagcaagctataaacgacatgccccgttcctgacataaaagtgaagatataacagataaacggcgctaataacgtaatgtaacgcgggtggcgacgcagaattttttccgccagtttgaccagtaaatccagcccgccggaggcctgtaaagaagcggccgccaggacaacagaaagaataatcagaataacatcaatcggtggcgtagaaggcgtcaggccaaaaataaaaaccatcacgccgacgcctaacccgccgaccatccctaaaaatacgccgccgatcctggcgcctatcatcagggccacaaggataaaacataattccgtccaaaacatacttcctcctgggttatctggagtgagtgtcgctttacattgagggacgtaacctattgtgcaaacggtttaccaaaaccaaatgcgccgtaatgagataacacctgcgccgccgatttcccgccctgccgcatggcgcgtaacacgctttctttatcgggttccgccatacccgattgcaaaatggaaagcaaaaaaccggttaagaaggcgtcgcctgcgcccagcgtatcgacaggttcgatataagcaggttgccactccagataatccgcgccggaaaaataataaactttttcatgcccgcaggtggcaataatatgccgacagccataacgataaagtttattgagttttactttgatttcatctggcgataacccgctacaggagataaatccgtaatctacccacgggcataccttttcaaaatagtcgtctgtaccgcgcccggaaaaatcaaaagagagtaagacggtttgttgtttaattttctccagttccgattccaggtggccgttaatactggaatggactaaggtaaattgtgatatatagcgaagatcgtcgtcagacagactaaaaggatgttcccgcaatacgccgtttttgttgctggcgacaaattgccgatcgccatgcgagagacggatacaggcatacccattttcgccggtataatggcggctgtgagagatgtctatctgtagctggtgtaatacatcctgtacgtgctgcgcggcgtcgtcattgccaaacgcccccataaacgcgctggggatgtctgctaatttcgcatagacagcaaaatttaatgcattaccgccggggtacatgatgccggaatgcaggtatttatcgacaacgttgtcgccaatacccaatacgctgatgctcatcattattccttgtttgtctttacaataaaaagcgtccctgcttttttatccatcctgatgtaattaatattccactttccacatatagcggcgcgtcgttaacggatgctgacgcgcctcagctaacgcccgattgtaaacgggataaacgttattaaagagagagtggttaaagtaatcaataaccgtggttttaatggtcgatagccccagttctttcgcatcgacaacttcaatccggcggccatattttttcaggaagtttaacgcgcgttcatccaccgcccgcgtattgccctcggaaaactggaagaagaaaggcgtattcgcatcggtaatttcaaacggcccgtggaaaaactcaccgctatgaatacaggcggaatgtatccattgcatttccataaagatgcagatgctctgtaggtaggctgcgccatagcccgcgccgctggcgacggtataaatgactttatcgtctttatattcctgcgcgaacgcctgcgcacgctccgctacctgctcgcaagcgcgccagacgatacggttgattttgctgacgccatcctgaaaatcgtcgtagtgcgcatacccttccgtctgctggagcagttcgaccgcactcagcaggcctttcatcgttttctctccggcaatatctttaccgtcgccaaacgtgtacgtttccacatagtcgcaatgcgccaccaacggtgaatccattatccaggttaaaccaatgaccggcgcgccgtgctgacgggcgatttcagccgctttaattgtctctggcgtattacctttgtgggaggcgacaaccacaacggcattttctcccagcgctaccggcgggttgttaataaattctccgctgttatacagaccgacagtcaacgctttcgcttctttttctaaaaatgctttcgccggatagaacgccgcataagaaccgccgcacgccacgtaatagacgtgtttaacgcctcctttctctgcctggctggtcacaatattgctaactgtctctttcatacccatcatgctttcctctggttccatcaatgatacaggcgaggattcgccataaatgactcataatgtattattatttttatatgacatttaaagacatttgatcaagatggaaaccaaaaaaaatcgggatccgcgatctggatcccgattcagcctgctcttcgttagcgtaatgctgacatcatacggtaaaccgtattttatcgccgacaatcaactgttgcgaaacgcaggagagttctcctttgttatcaatcatttcactttttatcaggatcagcggataaccctcgttgacgccaagataatgggcgacttcaaagctggcataaaccagttcgatcatcttacgggagtgggtaaaccataaatggtatttctcgcgtaagcattcatacaaagagtgattattaagatcttcgtccagcaaaaacgcaaaacgtgggggaagatgtacggtttccagcgataccgccacatcgtcggcatagcggatacgttcaatgacgaccgctttttcgccatcgttcatattcagtaacgcttttgtctcatcgtctaccgattcaaaaacggatttgatggtgcgtgaccccgggcgacgtccctgggactggcataactcgctgaaactcatgatgccggtcatgctgcgctgaaatttctcaccagagacaaaggtgcctttgccggagacacgggtcagcaaattttcacgcgtcagcgcatccagcgccttacggaccgtgaccctgctcacctgccagcgcacgctcagttcattttccgtcgggatctgctggcctggtttatactctccacgcgcaatagcctcttttaaggcggcttcaagctgcttataaagcggtttggcgcttttactgtcgggttgctcgatcatttgtatccatttgtattatcatgatgccatagcttgtattataactatttacgttacctttgcttgtgaatccacgccatgcggtgacgtagtgataccgctatgaaacgaatgttctgattttaggtctggggcgggcgtcatgaaaataggattttcgcaatactattcagtaagttatgaagtgtttttcttgagagacaaattgcaaaatgtgatctatcgcacactttgccactcaggtatcgaagcgaatgtctacgcttaatagacagccgggcaacacccgtatcttttacgacgcaagccggaggtccttgtcattatgctcaaccagaaattaaaccccacgccttctgaagatctgactattgatgtcgatctgctttatgaaacagacccgtgcgagttaaagctggatgaaatgatcgaggcggaaccggagccggagatgatcgaggggcttcccgcctctgacgccctgacccctgccgatcggtatctcgaactgttcgagcatgtacagtcaacaaaactgtttccagacagtaaaacgttcccggactgcgcgccgaagatggacccgcttgatatcctgatccgctaccgtaaggtcagacgccaccgtgattttgacttacgccgcttcgtcgagaaccatttctggctaccggaaaccttatccagcgagtatgtctctaatcccgaaaactcgctcaaagaacatattgaccagctttggccgatactgacgcgcgaaccgcaggatcatattccgtggtcttcgctgctggcgctgccgcaatcctatatcgtgccgggaggccgttttagcgaaacctattattgggactcttattttaccatgctgggtctggcggaaagcgggcgcgaagacttacttaaatgtatggcggataatttcgcctggatgattgaaaactatggccatattcccaacggcaaccggacctattatctgagccgttcgcagccgccggtttttgccctgatggttgaactgttcgaagaagatggcgtgcgcggcgcgcggcgttatctcgaccatctcaaaatggaatacgccttctggatggacggcgccgaatcgctggcgctcaaccaggcttatcgccacgttgtgcggatgccggacggttccctgctgaaccgctactgggacgatcgcgacacgccgcgcgacgagtcgtggctggaagatgtcgaaactgcaaaacactccggtcgtccgcccaatgaagtctaccgggatttgcgcgccggggcggcgtccggctgggactattcttcacgctggctacgcgatgcgggccggcttgccagcatacgtacgacccagtttatccctatcgatttgaacgcttttctgtataaactggagagcgctatcgccaatatttcagcactgaaaggcgaacgtgacaccgaggcgctatttcgccagaaagccagcgatcgacgcgccgccgtgaaccattatctgtgggatgatgaaaacggctgttatcgggactatgactggcgacgcgaagaaatggcgctcttttccgccgccagtatcgtgccgctgtatgtcggtatggcgaaccacgagcaggccgaccgtctggcaaatgtggtacgcagccgtctgttaacgcccggcgggattatggcgaccgaatacgaaaccggcgaacagtgggataaaccgaacggctgggcaccgctgcaatggatggcgattcagggcttcaaacggtatggcgacgatatgctgggcgatgaaatcgcccataactggttaaaaacagtgaaccatttttatcaggagcaccataaactgatcgagaaataccatatttccggcggtacgccccgcgaaggcggcgggggcgagtatccgctacaggacgggtttggctggaccaatggcgtggtgcgccgcctgattggcctttacggagagccttaacctgctccggcctcagtgaatcgcatcataaatggctgactgaattttcagccattttttattgtctgcgctgggccgggcctgagcgcgcaatcgggcctgctccgtatcgtgctgctggcgcgtcacaacagccggaacggtgcaaaacgtttgcaaataggttttatgcatcgcggtcagcggcgcgccgctcgacatgtcatgacttaacgttgtgataaatcgtcggcagggtttgacctcatccatcagcgcgggataacgcaacaacagttgcagcacctcggtatgtcctgccgcaaacgcctgctccgtccacgcgagctgccagttcattccgccctggaggaacagcgccgtcacccgcgtatcattgcgctctatcgccgcccgcatggtaaacgcatcccaggtaatccccatatgattgagcgtttcccgcgcggaaggcgcctcgcgcggcggttcatcctgcgccattgcgggagcttgcccgttatcggagcctggcgacgacgaactaaatagccagaacgcgcccgccagtatcgccagcgtcatgacgccaaccgcgccccacaaagcgccggaaataagttgctcacgctcttcaggcgtacgcggaggccgcttacgcggtggttctatgctctcgctaatctcatgcttatctcccccggcctgccgatctttaagccgcgcggtttcccagaactggcgcaattcacgttcatccgccagcagaaacgaagcgggattcacgcgggtacgtttttcggcataggcgcgctggatgggccgaacgatttgctgatactgaacgtttagcagcataagctgcgctgaggtaagcggctgcctggcgataacctcgtttcgcgcaaggcggcaatcatccagaaacatacgcagagtggtgcgcgactcggcgaacagcgttaacgctgaggcatcattaaaaattctgacgtaatgacgggcaaacaattttttatcgaccaccataagcgccagttcgctgaacaacatgccctccagcgcatgttgatcttctccctgttttaaccactggcgcaaacggtccgggccgaaatgttgcttgaggtagtgattcagcgacgcccgatccggccatgcgcgcgcaataagcgcttttaacgtcagttctatcgcccgaagctgacgctgcgcctcaagatgcgcctcctggtcgggttcttccagctcagtttgatacgtcagtagcggctgctgctgacgtagatgctccagcgaggtgacaaaacgcaacgcggcaaggagttgattttcgctcacctcttgcccgctgtcatactggggaacatgctgctgaaggtgacgcagttgcagcataaactggctcaactgcgcgtcatttatccgcaattttttcgccaccgcgccccaaccgcccaggttaagacgcgcctgctcaagttgttccatgaaccaccggggctcttttccctctgtggtatgaatacccagcagcagcaggatttctattgatgcctggcggataatccccaggctatgttcaaaaggcgcgcgtgtcgcctgcgaagcgctattcgtcattatcttccctaaaaagacgatcccgcgacgagatcttcgttttcttttaattatgttttttcatagatataacagatttagccacatttcagtgacttaatcttaatgattgcaaatttataagaagatcggttactaaccaaaaacatcagtttttcattctgtcaacgcggcgtgacgctgaacggcatagaccttttccctgcctgcgtttggccgtctgaccgctagccacgcgtgcagcacactttataatcgcgctttttatgagaaagatgccatgccgcacatttcatctcgctttagctccgcctgcatcgcgtttattaaacagtggcagggtctgtcgctggaaaagtatcgcgatcggcagggtaactgggtgattggttacgggcatatgttgacgccggatgagacgctgacgttcattacgcccgaccaggcggaggcattcttgctggatgacctcaatagctgcgatattctgctacagaattgcttgccggaacttaacgatcggtttcaacgcgaaacgcttattgcgctgatgttcagcatcggacatcagcgttttttatcattaatcaatacgggtgatatttcacagccagaaataagcggactgcgaatttaacgtcgttaattcgattcatttaacatcatggcggcctgggtacgattttttacatccagccgccggtaaagcgactccagatgcgctttaaccgtcccggtactaatatttaacgcccgcccaatttgtttatttgattctcctgcggcaagcatctgtaaaatttcccgctggcgggcgcttaacgcttttatatcacgggactccagctccgttgaatttaaccaatcccccggtaaaaacatcatcccgcgagcgacagcattgagcgcaaggacaaaggtttcagcatcagaatcgcgtggcaccacggcctgaacgttaaattgcatgacttcatgcagccacttttgactgccatccatcgccgtgataataatcttcacctccggaaattgctgcgcggttctttgtaacacctcgcggcaaaactcagcatccaggccgctatccagcatgaccagcgcatccggcgcgctttctattttttgccagagttcttctgcctgaccgacactctggatacttattcctggaatgtgctgctgcaaactgattttcattccatgaataaatattgactgcctgtcaaacatgattacctgcattacttttctccacctgggtaagataatagtctcaagatgaggaagggtattacccgtagggtaaaataagaagtcgccatttggtataggccattttaccgatagtcattggttgaggaagggaaaggttatgaatatttacagcttcaacatcgggattacagaattcgctaaaattagccttttaaagtaaggaatatcttattagcgcgaacagctaaggctaatttgaatattaatttaatgaagagtacgcctggcgcgtcacaaaggaaatatctgcttttcgcctgatgtgttacaaaaaataaagtagcacattttgttaaaaaatagccaatccgcctgaaaaccgcgacgatgggtcaatgacaataccgtgtatgtacatgcatttctctgccccactgcacccgctgttatcggcgtgttttaccgccctcgccccgtttatcggctttttggcgctaaaatgcctggccggaaggcgataaatccgccgcgcaacgcgatcagacgtattcgtcacgcgagcaatgattgcgaaagggcttattaggtgctagaaaatcaataaaaccagccgcttcagcgtcactgtttcaataagaacaataatagagcctgatgatggataaaatatatgcaatgaaattgtttgtacgcgtggcggaacgggaaagtttttcccgtgcagcagaggatatcggccttcccaaaggcagcgtctcacggcaaatacaagcgttagaacatcaactgggcatccgcctgctccaccgcaccacccggcgggtacagcttactcaggacggaatggtttactacgaacgggcaaaagatctgttgagtaacctggatgaactggagggtcttttccagcctgatcccgccagtatcagtggcaaaatacgggtagatataccgccatgtctcgcaaacagcctcatcatgccgcgcctgcccacttttttgcatcagtatcccggcattgcgctggaactttgtagtagcgatcgacaggtcgatttactacgggaagatttcgactgcgtggtgcgcacagagccgctacatgcgccagggatactgacgcgcccacttggcaaactgaggagggtgaactgcgccagcccacaatacctggcacgctttgggtatccagaaaaccttgacgatctcgcctcacatgcgatggtgcattattcattgaccccgggagtctcttcaccgggttttgcctttgaaactccccacggtatgcagtgggtaaaaaccggcggaatgctaacggtaaacagtacagagacctggcatacggcctgtctggcaggattaggaatcattcagacgccgcgcattgctgtacgggaggcgttacgcgccggaacgctcattgaaattttaccgcaatatcgcgccgctccactgccggtgacgctgcattatccccatcgccgtaatctttcccgccgggtacacctgtttatggtatggctgacggaaaccattaaagaggccgcagagtagccgcattttcagcatccaccggggagaagctatactgacatattctattaatgatgaaggactaccgacctgatgacgcaggaaaatgacgtaaaacgccctattcaggaactggagcacgacccgatacaaaaaatagaaacgcagccgcatgacgccccggaaaaaaacgaaaaggcaaatcaggcgttgcattccgtcaccaccctgatgcaaaaaattcagcgtcaaccaatggtggcccacctcattcgcgcgaccgaacgttttaacgatcgactgggtaatcagtttggcgcggctatcacctacttttcgtttctgtcgatgatcccgataatgatggtgtcctttgccgcggcaggttttatcctcgcctcgcaccctaatctactggaagatattttcagcaagatattgatgaatgtgagcgatcctacgctggcgtccacgcttaaaaatacgattaatacggcggttcaacagcgtaccacggtagggctggtcggactgggtatcgcgctctattccggcgttaactggatgggcaacctgcgggaagcgattcgcgcccagtcacgggacgtctgggagcgcaagccgcaggatcaggagaaaatctggctcaaatatctgcgcgattttatctcgctgattggattattaatcgctttaatcattacgctgtccattacttccatcgccggttccgcccagcagatgatcatctccgccttgtatctcgacagcatcgaatggttaaaaccggcctggcatttgatcggtctggccatctctatttttgccaactatctgcttttcttctggattttctggcgactgcctcgccatcgtccccgtaaaaaagcgttgattcgcgggacatttattgccgctatcggttttgaggtgattaaaatcattatgacttatacgctgccgtcactggtgaaatcgccttccggcgcggcgtttggctccgtactcggtctgatggccttcttctacttttttgcccgcctgacgttattctgcgcggcctggatagccaccgccgaatacaaggacgacccgcgaatgccgggtaaaacgcaacgctagtctgcggcttgctgccgaatggcacgcacggcgtcgtcattcggcctactgatgtgtagacccaggccgggcaagcaaagcgtacccggcggtacaatcaggcacgtccttccgcctcatctcattgtttcagcatataaatccagtaattaacttttatttaaccagaaaccagttttatccaccaattctaaaattatgtgaagcatttcatagacgcaaaatggctggcttaaacattatcccctttttgcgctttttttgaccatttttagcttttgttacacattgaaatataacttttgctgtgcgtaatatggctattcgttcgctaaaaataagaaaatagtatgcaagcaaccgccacaacactcgaccatgagcaggaacatgttccggtaaactcacgcaataaagtcgttattgcctcgcttatcggcaccgcgattgagttcttcgacttctatatttacgccaccgcagcggtgatcgtgttcccccttatcttcttcccccagggcgatcccactgcggcaacgctacaatcgctcgccaccttcgctatcgcgtttgtggcgcgtccgattggctctgcgctattcggtcacttcggcgaccgggtaggccgcaaagtcacgctggtggcttcgctgctgacgatggggatctccacggtcattatcggtctgttaccgggctacgcgacgataggtattttcgcgccgctgctgctggcgctggcgcgtttcggtcagggactggggctgggcggcgaatggggcggcgcagcgttattagcgacggagaatgcgccgccgcgcaaacgcgcgctgtatggctccttcccgcagttgggcgcgccgatcggcttcttttttgccaatggcaccttcctgttgctctcctggctgctgaccgacgagcagtttatgagctggggctggcgcgtgccgtttatcttctcggcggtgctggtgattatcggcctgtatgtgcgcgtgtcgctgcatgaaacgccggtgtttgcgaaagtcgccgcagcgaaaaaacaggtaaaaataccgctgggcacgttgctgacgaagcatgtccgcgtaaccgttctcggcacgtttattatgctggcgacctacacgctgttctatatcatgaccgtctattccatgacttacagcacggccgccgcgccggtggggcttggcttgccgcgcaatgaaatactgtggatgctgatgatggcggtgattggtttcggcgtgatggtgcccatcgccggcctgctggcggacgcatttggccgtcggaaaagcatggtcatcattaccacgctcatcattctcttcgcgttgttcgcctttaccccgctgctgggttcaggcaatccagcgctggtattcgtgttcctgttgttaggcctgagcctgatggggctgaccttcggcccaatgggagcgctgctgccggagctatttccgacggaagtgcgctataccggcgcatcgttttcctacaatgtctcatcgattctgggcgcttccgtcgcgccgtatattgccgcatggctgcaaagccactacgggctggcggcggtaggggtttacctggcgtcaatggcggcgctgacgctgattgcactgctgttaacccatgagacgcgtcatcaggcgttgtaatagggcgccggatggcatcatccggcgctacgtttcacgttactgcttcatctgcgttaaaatcgtccggcactgattggcttcgccttcagagggcgaaattagcgccaatagcgcggcggcgggcgttaccaacgtcgccagcgctgccgcaaccgcgccgcgcgcaatcagcgggccgggcttgacgcccgcctgcggatttttaaatgtcccgcgcacgtacagcggcgatcgcagcgtaataatacgaatccccttactttccggatcaatggttaaatcgagctgttcagaggcgaagctcgccgtaccggtcacgttaatcaacgcattttctgtatcaaaagcaaaaatttgcggtcgcgccacgccgttcgtaatattgagattcgccgccgcgcagttaacccgcacttcgtcatcgccaaaaatctgcccgacaatatagttgccgacgttcagccccacgatttccatcaggttgcggctaatcaatccatcattcatcaataacttcagattgccgttactgttgccaagcagcgcggcgaccgagttgcccgtcccgcgaatatccgcatcgccgttcagctcgcccagcgttttctgcatcagctccacatccggcatcagttctttaagcttcagccgacgcgcctgtatatccgcccgcccctgcattggctttttatccccttccagatggatgttggagacaatactgccgcctgccagaccaaacttcagcggctgtagacgtaagtcggcgtttttcaggatgatatgggtcgaaagatcgctaatcggtagactgccgccatgttcaatacgtcggcctttaaaccggacatcggcgtccataacgtcccatttgtcggtttcaaagcgatcgtaaggcaacactttatccgccggctgaacattcttctcgcctttgcgctgttcagaccgtttcgactgctcagcgtctttcccggaatccacgccaatcagcggcccaagatcggccaggcgtaactggcgcgattcgacatcgccttccagtttagggcgcggtttaccggtggtataagtgagggagccgtggatatcactgtcgccaatgcgcccgttaaaaccgcgataatcaaatactgatgacttttcggcgtcaattttcgccaccaatcgcccatcggtctcaaacggcggcgtatccggcagcagcacgccggttaaatcatataaatcgcccagtgaatcgccagagaatttaagccgcagatcgacgccgcccattttcatcggttcgttcaccacgccgctaaaagccacccgcgtattaccagagcggaaatcggcctgcacaggaaaaggcgtactttcgctgcgtagcgccagcataccgcctattttccccgtaccggtcaacggttccccgttataacgcccctgcgccttcaggccgaagacatagtcgcccacggtggatttgtctgctttgcctttcgttcccgtcacttcgctgaacggcaacggtttgcctaacggatcgatcagaatagtgatatccgccttgctgaccttatcatcgatcgcgattcgcccctggtcgaagagaatattatccagccggaaggaccaggcggaaggtttagcattggggtccgtattcttgtcttgcgcgaggttaaaggtccagttattggttttctcggacagacgaataagacgcgcgtcgggtttcaccagtttgatccacggcagccagacggttttggtcaggagcgccagtggggcaagcgtcgcctcaacgcgtggcagatgcaccatcgtgacttccggaatatctggcggattgccgagaatgacgtcttccgcgtgaacatgcggccacggtacccagcttcgccagccggtctcctgtttttggcgttcccacaccacgcctaaatcgccgcgaatagcgaaaggccggttcaattcggtagagactttctggttgatggtcggtttgaggcggttccagtcaaatgttgcgatcaacaaaatcactatggcgatcaacaacaagaaagtccctgtgatggcggcggttattttgcctgctttagtcatgtgttatttcctcacttcttcccttgcctgtcctaaagatagttcagccagacgaaaaaggaggatgaccgcgcctcgtaataccacgtattacgggaacagtctggcgttacagggtcagaatcacctcttcgagcgatatcagcggcacgggtcgagaaagaaaatagccctgggcggcaaaggcgggcgaacgctgcacatcacgccactcttccagcgtctccacgccctcgacaataacgccgcggcagtagcggttcatcagttgcagcagcagagtgaacaggttgcgtccctccggggactgacgcagcatgacgaacagctcgcgcgccactttaatgtagtcataacgcacttcgctcagcgctgaaaaattggccataccggtaccaaaatcatccagccacagcgggccgaactcacacatcgaggcgaaagaggagtctttcggcaaacgaatatgttccaccagttcgaaacgcagccagggtaagcgctccatcgctgccagaatgtccggctgtcgtcgcatggcaatcagcgtagggccgtcgacattgaccgatgccaataagtgatggcgagtgaaaaaatccgctttttgttcgagctgatgaagttgttctttcactacgtcaatgcggtgtcgaaccgctaactccgcgaaataacgatccggggcaatacgtctggaagggttatcaggatgggtgacgacagtgagaagttcaaccgccatcagacggccatccgtctggtatatcggctggtaagtataggcacgctcgcattgcagccaatagcgccgttcctgcaaattctctatacctgcatcaggaacgcgtagctgctggataacctgctttatcatctcagttgtcctgttaatgggagtgtgactgtccggactcgtcaaaggttatcggcgttcaggcagagaactttaccctcggtccctggcaaaataaaaacagcccccgaaacttgtcaaaaatacgcacttgctcaaaaaaataatggaccgatgttttaatattattgaccactaaacatccacagcgcacactaacgctaatttttacagatcaggttcacgactatgtctaaaaagattgccgtgattggcgaatgcatgattgagctgtcgcagaaaggcgctgatgttcagcgcggcttcggcggcgacacgctgaatacctccgtttatattgcccgtcaggtcgattctgccgctctggccgttcactatgtgacggcgctgggtaccgacagtttcagccaacagatgctggaggcgtggcagcatgaaaatgtggatacctcgctaacgcagcggatggaaaatcgcctgccaggcctctattacatcgaaaccgatgacactggcgagcgtaccttctactactggcgtaacgaagcggcagcgaaattctggctggagagcgagcagtcagcggctatctgcgagacgctggcgaccttcgattatctctacctgagcggcattagcctcgcgattttaagcccgaccagccgtgataagctgctgtctttattgcgtgaatgccgggccaacggcgggaaagtcatttttgataataactatcgcccgcgtttatggacaagtcgcgaagaaacgcagcaggtctatcaaaagatgctggaatgtactgatatcgccttcctgacactggacgatgaagacgcgctatggggtcagcaaccagtggaagaggtcattgcccgcacccatgcggcaggcgtgcaggaagtggtggtaaaacgcggggcggactcttgcctggtctcgattcagggcgaggcgctcattgacgttccggcagtgaaactgccgaaagagaaagtgatagacaccactgccgcaggcgactccttcagcgccggttatctggccgttcgtttgacgggcggcagcgcgacggatgccgcgaagcgcggacacctgacggccagcacggtgattcagtaccgtggggccattattccgcacgacgcgatgccgcagtaagtcattcgctcttgcccggtggcgctgcgcttaccgggccgacaggcggcagcttactgtgccgccggtgtctccgtcacttccggatgcgcctcatctgcttcaacagcggcggcagtagtcgggaccatgatttcatcccacgtcgcctttaacgccttcatattaaattccggctcgccttgcggttgcagcaaaattaatgccatctcctgcgatagctgctgacgtaaattctgattgagcatatcaacggtcaggctgttgaggaaattctggcgcagcttctgatactgctccggcgcgatatccaccacttgattctgcagcgagcgcatacgctgtccagtcaaaatgtcagtatcggtacgcgcgtaggtcgcgaacagcttttgcaattcgagatttttctgcgccaccagcgcagtaaactcctcttccgacaaacctttgtcgcgtactttcgccagttcattcgccaccaggctcaaattggtattgagcttatcattaggtgattcaatgttgatggcgcactgcgcgcgcagaaacagaacccggcagtcaaaccccagaccaatatctttcgcgttatttttagtaagctcttgctggatatgccagaacagcgcttcgcgcgccagatccgcctgccagtagcgcaacagcgccgccgactcgcgaatcggttgccacggcgtatcccacataatggagagacgatcctggcgcaccgcatcggtcataatgctcactgattccgcccgcagcggcgaaagcgtcggcaccggggcgggcgtttcgcgtttacctttcagcgtaccgaacgttttattgatctgctcggcgacggagcgcgcatcaatgttgccgacaacaatcagcgtcatggcatccggggtgtaccatttttcatagaaagcctgaattttggctgcgtctaccggctgctttaacggttccgcgggatcgtgccccaataacgccgaccctttcagccgataacgccaccagccctctttagtatctgctggccacgtcgcaaccatatcttcgctgcttaacgcatgattcaccgtctctggcgtaatggttaatttaccggagacgttagccagataggtcagcgcttctttcagcagatcgttacggttattgggtaaactgaggttatagagcgtggaatcataagaaacaataacgggcggcatgggacgtttcggatcaaacccttgctgccataaagaacgtgcctgtgcggcatccagaccaccgctttgcgtcagcgcgatacggggaatcgcatggctgaacccgctctgttgcgtactttcggtgagcgaaccggtattaacctggagacgaacttcaatacgatcgctggggcgctgaggcgtagccaacacttgccactgtaacccattagccagcgtcccctgttgccatgccggatcgggctggagcgcatctgcctgcacatagccggcagaggccaacatcaacagactgcccgctaagagtcgaatttttgtgccctgcatgtgaacccctgatcaacaatcctggtaataaaaagacagccccggcagggatgcctgaatatgacgtaaaaacacttcgtgttagaccgcgagaacctaaaaatgtcacggaagaagtgaaataatccctaagcatcatgctgtatgctttgggcgcaggggtcaattatgcgcaaacacccgcagtcctggaagggactacgggcataagtggcgagattaggaggaaatttcgtgcgttttgccatccggcgcacgattattaagcacatcgtccagcttttggtgatctaactctttcacccatttggcaaccaccaccgtcgccacgccgttacccaccaggttagtcagcgcgcgcgcttcggacataaagcggtcgataccgaggattaacgccagtcccgcaaccggtaaatggcctacggcggagatagtggccgccagcacaataaagccgcttccggtcacgcccgcggcgccttttgacgatagcagcagcacgaccagcagcgttatctggtggaagatatccatatggctgttggtcgcctgggcgataaacaccgccgccatcgtcaggtagatagaggtgccatcgaggttgaacgaataccccgtcgggatcaccagccctacaaccgacttacggcaccccagtttttccatcttatcgagcatacgcggcaacgctgactcggaagaggaggtgccgagcacaatgagtaattcttcccggatatagcgaataaatttaaaaatgctaaagcccgttacccgtgcaatcgtccccagcaccaccaccacgaagagaatacaggtgatatagaagcagataatgagctgccccagttgcaccagagaaccgacgccgtatttaccgatggtgaaggccatcgcgccgaatgcgccaatcggcgccaggcgcatgatcatattgatgatgccgaaaatgacctgcgaaaaactctcaatcacattgaaaatgagctggcctttgctgcccaaacggtgcagcgcaaaaccaaacaacaccgcaaacagtaagacctgcagaatgttgccgctggcaaacgcgccgatcacgctacccggtatgacatccatcaggaaggcaataatgccctgctccttggcttgtgcggcataaacggccaccgcctgcgcatccagcgttgccggatcgacgttcatcccggcgccaggctgcacaacgttgacgatgataagaccgataatcagcgcaatcgtactgacaatttcaaagtaaagcagcgcgaccgcgccggtacggcccaccgctttcatgctttccatgcctgcgatgcccgtcacgacagtacagaaaatgacaggagcgatgatcatcttaatgagcttaacgaacgcgtcgccaagcggtttcatttgtgcgcccagttcaggatagtaatggccaaggagaataccaatggcgattgctgtcaggacctgaaaataaagacttttgaacagagaggttttcatagggtgtccttgaagtaaaaaccacaggtcttgtaaggttatgagtaacctgcggccttaaaataacacccacacaacatgacagaaatgcgccaggatcataattgaaacaaaaatgttaaaaagtttgagctggctcgcacaagcgcgaccttttttaacttttgtaatcaggattttcgtgcgacagataccgttcttcaaagatatccgcgggaacgggccgagcaaacaggaagccttgcgcgacgttgactcccgcctgttccagccacgcgcgttgcgcctcgttctccacgccctcggcaatcaattgtaaattaagactgcgggccatcaggataatcgccgtcaccatactgtgatcatccggtaacccatcgacaaacattttatcaattttaaggatatcgaccggtagcgacttcatatgctgtaactggcgcagccccgcgtaacccatgccaaaatcatccagtgcgatacgcacgccagcattacgtaacggacgtaagatagcgacggcagcgtgtggatcgtcgatacggcggctttcagtgacctcaagaatcagcgtacccggttgaatacgatagcggtttaacaattccagcagatccgacaccatgccagggtgcatgagctgtaacgcggaaagattgacggagagcggcaatgtcacgccgcgctcctgccaggcggcaagctggcgacaggactcttccagcacccaatagcccaccgtgaccatcaggccgcaggattcaatgcgctcaatcagcccctccggtaattcccagctaccgtccggctgctgcatacgtaacaaggcttcggcgcttaatacgttgccgctgcgcatttcgacctgcggctgcagccaaatggcaaactgatggttatccagcgcggtaaggatatcgctctcttcggtaaggcgctgttgagcggcctccatctgcgccgggtcaaagaactggatctgatttttaccttttcggcgcgcggtaaacgcggcggagacggcgcgaccatagagcgcttcggcggtcagatcgccataatacatcgcaatgccaatactgcagcttgggcgcagttgaataccctggatgggcagtcgttcattaatgatagtgagtatttgctgacctaatgtgatggcgtgccacggctctttaacgccgtgggcgataatggcaaagtcatacccgctgacctgcgtaagcaccatgcgcggcgccagcaccgacttcagcttctcaaccagcgtcagtaatagaatctcccgctgcgtttcttgcagcacgcctgccgtgtcacgcaacgtttcgcacgtcacgatgataagcgcggtggtctgttggcgggtgataacctgttccagcaatgccattaaaaaggctttattgggcagctcggaaaccggaaaacgcatcgcgttgtccgtttgctcctcgcgttgacgctgcataagctgctggttgaggttatagctgcgcaccagcatcccaatttcatcatcctgatgcagacgcggcaacgccagctgatgtccgatcagctcctgctgcggaatgtcgttcagctcgcgggcgattttgcgcagcggatgcacaatcaggcggtttacgcaccaggcgatggccaccgtcaggatcagcgataaaagtaagtaaatggtcactaacgtagagagcgcgctcatgacgaacttgtacatacggtacgaatccgcctgcaatacaaggtaggccagcggttgcggattggcaggacgctccaacgaataaaccggcaaagaaatttgtaccggcagttcgaagagacgcgtcaccataaccgggacggggcgttcaggaatgaagcgcttacgcaacgcctggaactgattcggcaataccacatcggcgcgactcaccacgcccgcaggtttaatactttccagaatggtttccgcgccggggagatccgcttttaaaatcgcggaagaaagaggttcccgaacagatcgcgcgatgctttccagttgcgtagccgtgttgtagcggttctgctgtaccagatggaacaacaaaacggtgcaaaagacaaaaacaaacatcatgacaacggccgcaaccattgccatctgtttaattgttaacgagcggctgacgcgcaaattgactctccctggatatcccggactgccgcctgagtatacccgattgcagcggcattaagagaggctgtatctgaaaaggacttttctgaataacggttaatgatagcgtctgatggcgctgcgcttctcaggcctacgacgcctgtcaattcgtaggcctgacgcaatgattaccagtcagcgtaaggcaccagaggctgcggcggtaaatccatatccccctgccagcccgccgcggaataacgaacatacagcagcagatgactgggggtatagtctttcgcctgctgaatatcgacagccgtacccacaaaccagttggcagtgacccggcgttcaatgagcgcccgcgcggtatagccaaatccctggctgctgccgccgccgttggtctggtcacgcgcatcctcctgataatctgccgggatcaaattcatcagcggataacgcggcatggtacggttgcgggagtgcgaccaggataccgagccgcctaactcccacgaccagttttccgtacgctgccgccacatcaccggcaccgcaaacgacaggtattcctgcgggctataataaccgccctgacccagtgaataaccgctcagatctttgtcgtaatgccagatcatgttattcagcccgacggtaacacggcggttattctcgttaatcaccttatagtaataaccggtcatccagcgcacgcgccagttatcttctacatttttaccgctcaactggtcgccgctgagcgacgcccagacaccgtttgcttcgcctttatcatagctgagactgacgccgccgccgttggcccgcacgccgccccatttggtgccggtattgctgctggcatccttttgcccgccaaacgccagcagcgagctggagatcgggcgacgatgcgcgttcagggtataacccaacggcccgatatcgtcgctatagctgacgccgccaaccacatcaacgacattaaagcccatcggcgtcgtgccgatatcccagcgccaggtctcattctgccagccgaccgccacgctcgcgcccgtatcggcctggctacgatgtccgctgcatttctccagcgtacaggtaccccagttattatcgtattttccatccgcatccgtagagaagcggccaacatccatattcaccatatcagtacgaaagaacgcccgtccgtccgaccagggcgcatccacctgaagcatcgtggtatgcgccttcagatcggagtaaccgccagtcccgctcgacccccaataatcgtgcgccaacgtgacattgagatcctgctgacggtacaactccgccgcatcgctacgcacgccgcgttttagccagtcgtctttttcatcattgcgcgtcaggcgggtaaaggtatcgttatcctggggacgaaccggcgtaatcgccgcggcgaccattgcgtctttgtaggtctccagcgcccgctgcggctcgcccgtttgcgcctgaaaagcggcggcgtcacgcaataccatcgcgctttccattgatggcggctgtgcttttgcctgcggcgtaatgcggttgaaggtccgcgccgccgccgtgatatcgccaagctggagctgcgccagcgcgacgcggcgctgcatgttaatagaggtgatttgcgacgcaggcagcgccgccagctgagcgcgcgccgcagcgttatcgccctgtgcgatgtcgatttccacccgccccagcatggcatcgacattacccggttcccgcgccagaacggcgtcataagcggcgcgggccgccgcattatcgccacgctgctgcgcccagtccgccaacgttaacgcaatgcgcgtagagggcggctgctgacgtaacaacgcttccgcttcgcgttctttgccgctatcgcgcaagcggttagcgctttccagcacctggttactttgcaatcggcccgccagttcctgaatattgctgttccactggctggtcggcagggtattgagatgcgccagcgccgcccggtcccgatcgctgccggaaagataaagcccataagcatagacctgttccggatcgtttggcttctgctgcgccagagagcgcatttgcgcatcggcctgagcgtgctgcccggcctgccacagatcgcgtgacagtcggtacgtcacccacacgctccccggatctaatgccagccgacgacggtgcagttctgcggcctgcgcccatttgccctcgctttccagcgtttccgcctgctgcgccagacggtcattttccagactgagttcgatatcgtcgatactgcgccgctggctggcggaaagagaagcgataaacgcggcggctttttgcggcgactgctggcgataaagattcgccagcccgcgtacagcattggtattaccgctatccatacgcagcgtctgctgataataacgttcggcggcggcattatctttgcgcgccatcgccacatcccccagccccagtaccgcgtagctgtcggtgttatccactgctcgcgcctgctgatagaaacgctccgcctgggccagattattcgcttttaaggccgcgtcgccctgctgaattaacagccagtagcgattgaccttcagcagactctcccacttatcgcggctgctgctgtgcggcgccatcgccagcgccttttcaaactgcgcgacggcgcgggcgcgatcgccacgctgtgagtatgcctgccccagcgcgccgaccgcctcgctgtcgtcctgccgggcgctcaccgcctgctgcaattgcgcaatggccttaccgccttctccggcattaaccgccgcgatgccctgcgagcgcgcacggaacgccggatcggctaactgtttttgctgctcgctaagctgggcgcgggcggcagacacgctatcgccttcgctaaactgcgtcagatagtcttgcaacgcttttacgctggcgtcgctaaccgggagatcttttatctgctggtaccagatggcggaggccgcgctgcgtcccgtactggatttcgccatctgtttaagcaccgcgaatccctcatcgcgccgcccgctggcgaacaacagttgcgccagcgcattttgcagagcgttattacccggactgacggcattgattttctgtagctggttaatcgcttcgtgacggcgggcgggcaatttcgccacggtcgtccagtattcgaccgccagttcgccctccggcggataacctttaaacagcttgtcgtagctggcgatcgcttgttcagtatggccggtcgtcgccagtaaacgcgcctcctgcaaagactggcgtccttgcggcgtggagagcagcatcgcggtgcgggaagattgatacgccgtcgactccggcgccagttgcgccagccggtcaagtagcttctgtgccccgtcgctatccccctggcgcaacagatagcggaaacgggcggcgataacctgtggatcattggggtcgatcagctccaggcgatagagcgactgacggactaagtcctcacggtgcgtggcctcgcccagccgaacctgctccagcaactgttgctgcgcggaggtcgctgcgccggcaagcggtgttagcgccataccaagcgataaacccaacaatgcccgagaaacgccccttttgccaggtaaggcgtttcgaccgccagccggcaaaaaagcgtgcatgagacttaacgtgaacttacgcattcctggccccagtcaggtaataattcacctttgacggtgaagcgaaaacggtgctgatcccagccttgtccaaagagagtcagcacatagttgtaataggcatcgctgccaggaaaatggtctgcgacccgctgtcgctgcacggcctgggcgtcgcgattttgcaggaaaggcagtaaggcggcggaaaacccgaccggccccgtcccttgcgcattcccgctgacgacatccactttctccggtggaacgccgtttttcatcgttaacgtcgccatcggtttaaatcgcgccagtaaacgcgctttttgcggatcgccatcatgcatcattcccgcccataaatagacgcgaatcgcatcgtagctactgatcagcgtcttttccgctttcaactgccagccttgcttgctttcataacgcacccagtccggcgagaaacctttcggcgcggtttccagcaaaagccgcaaattggtttcccgtaacgtcgaccacggcgcgccaaaacggctaaagtattgcgccaactgcggcggcagatagcttgggttaaaacgccagctattcgcctcggcaaagccgattttgccaggtagcagcattgagcccagccccggcacattcaggacctcttcgcgggcgatgcgttttagcaacgccgtgcccacctcggtataacgcgtctctttccacagacgaccggcctccagcagcgaccatgccatccagatatcgccgtcggacgcggagttgctgtccagcaccgaccaggtgtcgggatctttttgcccccacagccaggcgggcagatattcacgcaacgatccctgcgccagattgttttgcgtccagttaaacagttgcgcgaacgccggtcgatcgttcgctgcaagggcaaagaacatggcgtagctttgcccttcggaggtggtaatttttcgcgcatcgcccggatcgataacgcgtccctgctggctaatgtaatctttcttgaactgttcccacgcaggccagctacaggctgcctgcgcatttattgccgtcagcatgacgagcatcgttatccatccgcgcagcatagtcatcatgcgttactcatggtcagggtcgagacgacggcgactgagaatacgtagcagacgccacaatacccacgccagtaataccacactgagggccgccagtaccgccagcagcaccgggtgattcgccagcgcataccacagccgctcaaaccacggcagatgtccgacgtaatagatatcgccaacgcgcagactgtgaacgccggactcgcggatcaccgccacggaaccaaacatcgcggcgcgtttaccgctgtcgttcacggcgtcgttcagtagctggtaaccgcgcgggctgtcagccagcagagcaatcacgctgcgctgatcgttaaacggcgactggaagcccaccaccgccgccatcgggccgctggcggtgacggtggactgcgcatccgccgcgcgatcggcctcatccggcataatcgacgggaaagcggtctgccgcatcggggtttttacccagctttgtgtcgcctgcaccaacagatcgatacgcttatcgtcttttagcttgcccggaatagcgctaataatcagcagatcggcgtctttgtcggctatctgagcgctatcatcggtgattgtcagattaattgccgggaaaccggtctgtccgccaatggcgccgaccgtattcagcagcgtttccatttgcgcttcggttggggtcttcggcatcaccgccagcgtgtcagacaggtcggccatccggctgaacgggaaacccgcattggcgaacgcgcgtaaatccggcatcgcgataaagtggtaatatttcgaaaaatcgatagtggagtcatcccctatcaccacatgattcggtaccggctggaaggtaatacagttgtccaccgacccgcccggcatcggattcatatagcggaagtcaaaacgtagttggttcatcgcccccagtttgagcgccggaatagacacatccgttttaccatccagcagtccctgaagtaccggcaggcgcaacaggagtcgattagtttcctgcgtgctgttaaggctaaaggcttgcaggaactggttattcagactgatatccagccgtgaactgtctttggtcggcggcgaggtataacggtagttgagatccatatcaataccgttgctacgcagcaaatagaggtccggcggcagattcaaagaaacgttgatgggcgccggctccagcccactcgactggagctgctcttcataggttttcagctcgccaaaagtgaccgggcgatcggtacgcacccagttcggcgcatcatacggtttgcgcgccagcagcggttttacatcgttgaccaccacgctggaaccacggaagagaatattcccttgtgcgataccttttgccgcctgcaacaggtctttatcatctcgaccaaacacaaccagcaacttcacatacggattatccggatggctcatcatctcgataaccggcgcgttaaccgcaggatgatcgcgcaggaaatcggggcgtcgatcgttggtggcgaacacgatcgcattgcgatccggcaggtgattatacaacaccgggaagcgctgaccgcgccagcccgcccgcgatccaaaccaggacgcgacaatagaagccgcctgctgctgcgccagatccggcatatcagcaaacactatcggcaacgtcactggacggttatcccgcggatcgaaaaacggcaccgggaagtgggacagatcgttattcaccgccagcatgttataggtcagatccagggcgctatttcgcccgatgtctaaccacagagtactgctggccgggttttcacacacgtcgcgatagtggccgacaaactccagccgcacccggttaaagtcggtgataaatagcggattgataggtacctgcgccagcgtctttttccccaactgctcttttgtcaccggcagtacgcccatcagttcatcattgagataaaccttgagctgcgactgaaccggcaggagcgacggcgagggcgtatattccagattcagcaccgctttcgacgccacttcatcgctgcgcataccaaattcaatgccgccgttagggttaacgccacgcagcgccatactacccggcggcggcgcgatttgcgcaaaggtcagcttgacctcgcgcgaaggcgcggtctgcgccacgacgggcgcctcagttgcgggcgacggcgcaggctcggtgggttcagcatttatcaatggcggcgtagcaggcgccgccgccgtcatgaaagcaggaaacgcgcttaatcctattaccgccgcacacatccaggacaattttcttttcatcgcattatcatcattgttgagcctgagccataacccgatccgacggctgtatcgccgcttgccgctccgggcgacgcggaataaacgatacaatccaggcaattaacgccgtcaacgatcggaaaattacttttactgaaggcggcgcgaattccgcgaggtggcgatatccgcggaagcccagcttcagaatatccagcaagctttccagcggtttatcttccgggaagctatcttgccaaagcgcccacgtatcggcgcgcgcgaaggtacactgcacaaaatcaatatgttgtttggtggtgagcggcatcagttgtagcccgacctcattgcccgttacgcgcaccacctgcgttggaaagacatattcctgctgcccgcgtttaagcaacagattcactttctgcccttccagcacctgcgcctgaccgttgatcttgatgcctaacccgccgtcggagaagtcatgtacggtacaggagaacaaatgtccatcttcgcgggcgatggcccccggcatggcaatctcgacccgatgcgcgcgcctgacctgtttactctctaccgaaaccgcaaccgcgccgccgagaatgaccaggttatagaagacccacaccaggctaacgatgacggtcagcgtttcattttccggcccgtaatagtatcgccatacgcccgccgccacgccgagcaggttaagcaagacaaggaagatatacggacgcgagattacccagtcgacgtacttctcttccaccagcccgcctttcgccgtgacgttaaatttccctttgtgcggattgatcaacgcgaccagagtcggcggtgcgatataccatgccagtaccgtttcatagatttcactccagaaagagtgacgatacttgccctgaatcttcgagttagtcaggctggcgtggaccatgtgcggtatcacaaatagcgcaatcatcaacgcaggcgcataaatgatataggcgtgcagcagcagaaaagccagcggcgcggtcagaaagatcaggcgcggaatgccggacaagaaatggaacatcgcgttgaggtagcacagccgctgcgccagttttaagcctttaccaaacagagggttatcgaggcggaaaatttgcaccataccccgcgcccaacgaatacgctgcccgatatgcgccgacaggctttccgtcgccagccccgccgcctgcggaatgcgcatatacgctgaggtataacctcgccggtgcagccggagcgaagtatgcgcatcttccgtcaccgtctcaacggcgataccgccaatctcatccagcggcttacggcgaatcaccgcgcacgatccgcaaaagaaagtggcgtcccacatatcgttaccgtcctgcaccagtccgtaaaacagcgtgccttcgttaggcgttttacgaaaacgtcccaggttgcgctcaaacgggtccggggagaagaaatgatgcggcgtctgcatcatcgccagctgtttttctttcaggaaccagcccattgtcatttgcagaaacgagcgtgtcggcacatggtcgcaatcgaagatcgccacaaactcgcctttcgcgtgttttagcgcattgttgatgttgccggctttggcgtgttcatgcgtggtgcgggcaatgtaatgcacgccaacatgtcgggcaaaatgacgaaatgattcacgcccgccgtcatcaaggatccagatattcagcttgtccttcggccagtcaatgccaagcgaagcgtaaatggtatttttgaccacattaaggtcttcgttataggtcggtacaaaaatatccaccgtcggccactgcgacatttctttcggcaacggcaccggttgacgatttaacggccacaccacctggaagtaccccagcaccagcacaatccaggcgtaggtttccgcaaacagcagaatcagcccgcacaccagactgaccgggtcgtcccaatttagcgtcgaggtatagcgccaccagatataacgacaggagaccgttaacgacagcacgatgagcatcagcgcggaaaagcgtcccggcatacgtcgtaccaacagcgcaacgccccacagcaacagcagaaagataaattgcgatagcgggttaaatggctgcgtaatacagatcagcgccagtatcagtgaaaaggtcacgataacgcccagaataaaacgccgggcgccgttgctaagatgtcccagctctttttccttttccaggtgcgttgtcttttggcgcacccgttccggtaaggtatccatccattgatggtaacgtccacgaacgtccttcaggcgcgcaaatgaccgccagcgcggttcatgacgttctttagtcgacgagatcatcaccagccagagggtctgaatgaggtaacgggccgggtccagcgggcgcgggcgtgcggcgttaatatgcggataaagcgctttatgcccgtcgcgaatacgctgccagcgcggatgctcaagcggaaacactatccacgccagaatcgtccacaggcagccgagcgctgcgctaaacggcgacgcgccgtggcggcggtaaccctgatagcgctcgctcaaacgcgcgctaaccggcgggataagcagccaccgggaaagggcgctcatcgcaggctcccggcggacgttttgtcgcccgcatcatgcagcaggcaccagttcgccagcgttaacacctcttcggcggctaacgaatcgctgcgatattcgcctaacggctgtttcgacgccatgcactccgccatcgcctcatcgcgatggatcacaatgggcagcaaccggcgctggctttgcagccagacctggtacagatcgtcctgtaactgactgccaatgcgtaagtcattgatcagaatatgcgctccggcaggcaacgcctgctgatgaaggcgaatatggcagttagcgtcaacccgggctatcgccagcgtatggtcgcagaggctcaccagttgccgtgtcagcggtgacgcgccgtagggcaagtccagtaaaatccagctataacgcccgctcgctttcagcgcctggatagccgatccgatctctcccagcgtctcctgccaggactgcggattttcccgctcttgcgcggtgagctgtccaaacggcagtagatcaagctgtgaggtataacgtaatccggcatcgcgccagtcctggccgtccagcaacgatcgcgcccaaccgccctgatggacgaagtcgacgttaaacgacatgcgcagcaggttatcggggctggcgtcaatcaccaggacattttcccctaagatttgtaacgcccaggcgagtgctgcggtgagagatgtggttcccaccccgccgcgcacgccctgcagtcccagaatcgccattcatggcttccttaatgaatgtggttgcgcaaattcagccaggagcggccatcttttaatcgccgccgccaactgttcgcgttgggaaatatcggtataatctatttcgggtagtgaaaacgcctggcttaatgccagaaaatcattttgaaaagtgtagcccaacgttggatcggactgagcgccaggttcattgttatacattctggttgctcctttttaaatatttctcactggcagcattacgccccgtcgtcaatacgggagaacgcgcatttttcatctttccgtgacatcatttataatgtgtaaaaatgcaaagcgcagagttacagggcatcctgccgggcaaattgattcacatgctaaatctgatgcgttttaatttcaatgttaggtttatttctgtgctttcgctagtaaactgataaacagttaaaatagtgacatgagggacactgtggaccccgtattttctctcggcatctcatcattatgggatgaactgcgccatatgccaaccggcggcgtctggtgggttaacgccgatcgccagcaagatgccatcagtctggtgaatcaaacgattgcgtcacaaacggagaatgcaaatgtcgccgtcatcggcatggaaggcgatcctggcaaagtaatcaaattagatgaatctcacggtccggagaaaatccgcttatttaccatgccggattcagaaaaagggctatactctttgccccacgatttgctttgttctgttaacccgacgcattactttttcattcttatttgtgcaaataacacgtggcggaatataacgtcagaaagcctgcataaatggctggaaaaaatgaataaatggactcgttttcatcactgttcattgttggttattaacccttgtaataatagcgataaacagtcctcgttgttgatgggcgagtatcgctcactttttggcctcgccagtttacgttttcagggcgaccaacatttgttcgatattgccttctggtgtaacgaaaaaggcgtcagcgcccgacagcagttattgctgtgtcagcaggacgaacgctggacgctatcccatcaggaggagacggcaattcagccgcgtagcgacgaaaaacgcattcttagccacgtcgccgtccttgaaggcgcgccgccgctctcggaacactggacgcttttcgacaataacgaagcgctattcaacgacgcgcgcacggcgcaggccgcgacaattattttttcgcttacacagaacaaccaaatcgagccgcttgctcgtcgcattcatactttgcggcgccagcggggaagcgcgctgaaaattgtcgtgcgcgaaaatatcgccagtttgcgcgccaccgatgagcgcctgctgctgggctgcggcgcgaatatgatcattccctggaacgccccgctttcacgctgcctgacgcttattgaaagcgtgcaggggcagcagttcagccgttacgtaccggaagacatcaccacgctactgtcgatgacgcagccgttgaaactgcgcggttttcagccgtgggataccttctgcgatgccatccatacgatgatgagcaacaccctgctccccgccgacgggaaaggcgttctggtcgcgctgcgcccggtgccgggcattcgggttgagcaggcgttaacattatgtcggccaaaccgaaccggcgatattatgaccatcggcggcaaccgtctggtgctgtttttatcattctgccgggtcaacgatctggataccgcgttaaaccatattttccctttgccgacgggcgatattttctctaatcgtatggtctggttcgaagataaacaaatcagcgccgagctggtgcagatgcgcttattgtcgccggaactgtggggaacgccgctaccgctggcaaaacgcgccgacccggtaataaatgccgaacacgatggccgcatctggcgtcgtattcctgaacccctgcgattgctcgacgacaccgcggagcgtgcatcatgatgaccatcagcgatatcgtgcaaattattcttttttgcgcgctgattttctttccgctggggtatctggcgcgccattcgctacgccgtatcagtgatacgacccggctgctatttgccaaacctcgttatgtaaaaccagccggaactctgcgccgcgctacgaaagtcaaggcagacaaaaaatgactcagcatactcaaactccttcaatgccttctccgctctggcaatactggcgcggtctttccggctggaacttctattttctggtcaagtttggcctgctgtgggcaggctatctgaattttcatcctttactgaatttggtattcatggcgtttctgctcatgccaataccaaagtatcgccttcaccggttgcgccactggattgccattcccgtcggcttcgcgctgttctggcatgatacctggctgcccggcccgcaaagcattatgagccaggggacgcaggtggcggaattcagctccggttatctgctcgatctgatcgcccgttttattaactggcaaatgatcggcgccatcttcgtactgctggttgcctggctatttttatcacagtggattcgggtcacggtgtttgtggtcgccatcatggtatggctgaatgtactgacattaaccggcccggtttttacgctgtggccggcaggccagccaaccgatacggtgacgacaactggcggtaacgcggccgctaccgtcgcgacagcgggcgataagccggtcatcggcgatatgcctgcgcaaaccgcgccgccgacgaccgcgaatctgaacgcctggttgaacaccttctatgccgcggaagaaaagcggaaaacgacgttcccggcgcaacttccgcctgatgcgcagccgttcgacctattggtcatcaatatctgttcgctctcctggtcggatgtcgaagcggcaggcctgatgtcacatccgctatggtcgcactttgacattttgtttaaacactttaattccggtacgtcttacagcggcccggcggccattcgtctgctgcgcgccagctgtggtcaaccttcgcatacccgactttatcaaccagccaataacgaatgttatctgtttgataatctggcgaaactgggctttactcagcatctgatgatggatcataacggtgaatttggcggcttcctgaaagaagttcgcgaaaacggcggtatgcagagcgaactgatgaaccagtccggcctgccaaccgccctgctgtcattcgacggctcgccggtatatgacgatctggcggtcctgaaccgctggttgacaggggaagaacgtgaagccaattcccgctccgcgactttctttaacctgctgccgctgcacgatggcaaccacttccccggcgtcagcaaaacggcggattataaaatccgcgcgcagaaactgttcgatgaactggacgccttctttaccgaactggagaaatccgggcgtaaggtgatggtagtcgtcgtaccggagcacggcggcgcgctgaagggcgacagaatgcagatctcaggcctgcgcgatattcccagcccctccatcaccaacgtcccggcgggcgtgaaattttttggcatgaaagccccgcatgagggcgcgccgattgatattaatcagccgagcagctacctggcgatttccgaactggtcgtacgcgccgtggacggtaagctctttaccgaagacagtgtgaactggaacaagctgaccagcaatctgccgcaaaccgcgccggtttcagaaaacgctaatgcggtggtgattcagtaccagggtaagccctacgttcgtctgaatggcggcgactgggtgccttacccgcagtaaaccgaaaaaggccgcaaggtttcccctgcggcctggttcgggcgcatgttgccattacggcggacagacgctcaaaacgcgttacttcctgtcacgtagccagttgacgatcacactggcgataatgccagcaatgatcggcgctgccagatcgtgccagaagaccacgcccaactgcgtaagcgtcatatagccgccttgttgcaatggcaaccgttcgcggctatccttaaagtgtttgggttcaagttagcccccgtcaggttgccaggtttataccagtcaacgtgcgggggttttctctatccagcaacctatgccgccggggatcaaacccccgcaacattgcgcctcaccgggtaaacccggcttgctgctgatattacggcaaaatccccgtcccggcacggcgctaacgtgcaatctgcgtgacgcttcgcagacgattacttttatttgccagaatacattcagcatttctgaggctggcagtcagccgctcaattctgtaaattatgcctcctcgcggccagtcccggtgataccgaaaccctcgttcagcatcctgcgtctatgacatattcgcctgttgcgccagaggaatggctaaaagcaggtattaccgacgaacttatccgtctttcagcgggacctgaagatcccgacgatattattcatgaccttgaacgcgccagcagaaaagcagcattctgacgattgctcggcgaaccgctgtcaccggtttgccgcatcgggtatcaaggcactatagcctggttataggcagcattctttatgagagagctgcgtatattttgggcagggggctctatgcaggacgacacattaccattaaataacagtaacgctacgaccacaccgctttcaacgagattaccgtttacaaaatatgattttggctgggtgctcttgtgtatcggaatggcgatcggcgccggtaccgtcttaatgccagtgcaaatcggtctcaaggggatctgggtatttattaccgcttttatcatcgcctatcccgctacctatattgtgcaggatatttatctaaaaacgttatctgaaagcgaaacctgtgacgattatacggatattatcagtcactatcttggcaaaaactggggcatttttctcggtgtaatctattttcttatgattatccacggggtgtttatttattccctgtcggtggtgtttgatagcgcctcctatatcaaaaccttcggccttactgaggccgatctttcgcagtctattatctataaagtcgcgattttcgccgtgctggtggcgattgcctccggcggggaaaagttattatttaaaatttccggcccgatggtggtggtaaaagtcgggatcattctgatattcggtttcgcgatgatcccacactggaatcttgataatatttccgcctttcccgccgcatcggttttctttcgcgacgtactgctcactatcccattttgcttcttttctgcggtcttcattcaggtgctaaacccaatgaacatcgcctatcgtaagcgcgaacctgaccgtgtgctggccacccggatggcgattcgcacgcatcgcattagctatattacgctgattgccattattctctttttctcgttctcgtttaccttttcgattagtcatgaagaggcggtatcagcattcgagcagaatatttccgcccttgcgctggcagctcaggtaatccctggccatatcatccacattacctctaccatcctcaatatttttgccgtacttaccgcgttctttggtatttatttaggttttcacgaagcgcttaaaggtattgtactgaatgtattgagtcgtattatggatgtcaaaaacgtcaacccactgttactgacatctggaatctgtgtctttatcgtggttactctggttatttgggtttcgtttcgcgtctcagtattggtctttttccagttaggcagtccgctttatggcattgtcgcgtgtattattccctttttcctgatttataaagtagcgcaactggaaaaattacgcggcctgaaaacctggcttattctgttatatggaatattgttgtgcctgtcgccgttattaaaattgattgaataagtcgtaccggagagccatgcccggtggcgctacgcttaccaggcctacaggtacggtgtaggcttgataaggcgcagccgccatccggcataaaacgcaattaactcagcggtttctgcggattttcatcctgatcgacggcaaagcaggccaccaactggccgtcgtactctttaagctgcggctgtaactgcgtacagggtccgaagcgacggctgcagcgggcgttgaaggcgcagcccggcggcgggttcagcgggctcggcaactcgccggtcagcttaatccgctcacggcgatcgtccggattcagccgtggcgtggcggagagcaacgcctgggtatagggatgacgtggattgttaaaaatctgctctttggtccctttctccacgcagcggcctaagtacatgaccatcacttcatcggcgatgtgttccaccaccgacaggtcgtgcgagataaagacataagacagccccatatcctgttgcaaatccatcatcaggttcagcacctgggcgcgcaccgacacgtcgagcgcggagaccggttcgtcggcaatcactacgtccggatcaagcatcagaccgcgggcgatagcgatacgctgacgctggccgccggagaacatatgcggatagcggtcgtagtgctcggttttcagccccaccttcgccatcatcgccagcgctttttcacgacgctgcgctttactcaggctggtattgatcagcaacggctcttccagaatttgccccactttcttgcgtggattcagggaaccgtaggggttctgaaacacaatctgaattttctgccgccgcagtttctgcgcgtgcggatcgtgtttaagcagatcctgcccctggtaataaagctcgccgccggttggcgtttcaatcatcgtcagcaggcgacccagtgtggattttccacaaccggactcccccactacggccagcgttttaccgcgttcgagattaaacgacacgccgtccagcgcttttaccagccgttccggagaaaagatccccttcttcaccggatagtgttttttcaggtcgatagcccgcaacagcggctgttgcaaggtggcctcatgcgtactcatagtgtgggcctcccggcatcatcgagtgggtaatgacattttgactgacgtccatcgtccagttggttgagagcaggttcttccgcacgacatctgtccgtggcgtaggggcagcgcgggttaagcagacagcccgtcggtcggtcatatttccccggcaccacgcccggcagcgacgccaggcgcgctttgtcctgagcaaactctggtaacgcgcgtagcagtgcctgggtgtagggatgacgcggcgcgcggaaaatatcctgcgcagcgccggtttcgacgacctgcccggcgtacatgacgataattttgtgcgccgcttccgccaccagcgccaggtcatgggtaatcagcaccagcgccatgttctctttttgctgcaactccagcagcagctcaatgatttgcgcctgaatggtcacatccagcgccgtggtcggttcatcggcaattaacagctttggtcgacaggctatggccatcgcaatcatcacacgctgactcatgccgccagaaagctggtgcggatagacatccagacgagaagccggatcgggaatacccacctggttcaacaggtcaatcgctcgctgacgacgggttttcttgttcccgccctgatgtaccttgatggcttccataatctgaaagccaacggtatagcaaggattgaggctggtcatcgggtcctggaaaatcatcgccacttcagcgcccaccaggttgcgacgttccttctcggaaatgcgcttcagatcctgtccgttaaagagcaggttttccgccatcacgcggcctgggtaatcgataagccccataattgccagcgagctgacggatttgccggaaccagactcgccgacaatcccgaccacctcaccctgcttcacgctgtagctaatgcggtcgacggctttgaacggtgtcccttcgtcgccgaagtgcaccgataattgatctacatttaataacgccatctcgaacctcttactgcttcagtttgggatcgagcgcgtcacgcagaccgtcacccatcaggttaaatgccagtaccgtcagcagaatcgccagccccgggaaggtcacgacccaccaggcgctttgcgcgaactgcagaacgtcagagagcatggtgccccattccggcgtaggcggctgtgcgcccatgccaagaaagccgagggcagccatatcgagaatggcgttagagaagcccagtgacgcctgaacgatcagcggcgcaaggcagttcgggaaaatattgacgaacatctgacgcatcgcgcctgcgcccgccacgcgggaggcagtcacataatcgcggttcacctctaccagaaccgccgcgcgggttaagcggacatagtgcggcagcgccacaaacgtcaacgccagcgcagcgttgccgatggaggggccgaagatcgccaccagcaccagcgccagcagcaggctcggcagggccagcataatatcgaccacgcgcatgatgatgttatcgaccagaccgccgaagtagcccgcgaccaggccgagaataatccccattaccagcgacaggacgaccaccagacagccgaccagcagtgacaaacgcgcgccatacatcaggcgcgagaggacatcgcgaccaacatcatccgttcccagaatatgcgcccaactgccgccttcctgccagaccggcggcgccagcagcgcatcgcggaactgctctgccgggttgtacggcgcaataaagttggcaaacaccgcaatcaggatcacgatgagaacatacgccagcccgacgaccgcgcctttattgcgtttgaaatagtgccagaactcccgcaatggcgtcatgggcgccggtgcggcattaacattattttcagtaacctgtgacatgatggccccttacttcttatgccgaatacgcgggttcaccacgccgtacagcaggtctaccagcaggttgacgagaataatcatcgtcgctaccagtaacacgccgccctgcactaccggataatcgcggcgttgcagcgcatcgatcagccagcgccccagaccgggccacgagaagatagtttctgtcagaatcgcgcctgccagcagcgtcccgacctgcaggccgatcacggtgacgactggcagcatggcgttacgcagagcatggacgataatgacgcgcatcctggtcaaccctttggcgcgtgcggtacggatgtaatcctcccccagcacttccagcatcgacgaacgggtcatacgcacaatgacggccagcgggattgtgccgagcaccatcgcaggcaggatcatatgcgccagcgcatcaataaagttaccctcttcgccccagatagcggtgtcgatcagcataaagcccgtcaacggattggtatcatcaaggaacaccatatcgctcacgcgcccggaaaccggcgtcaggttccagtggacggagaccagcatgatcagcatcatgccccaccagaagataggcatagagtaaccggtcagcgccaggccaacggcagtgtgatcgaagatagaaccgcgcttcactgcggccagcacgcccaccggaatccccacggcgacggcaaaaatcatggcgcagacgccaagttccagcgtcgctttaaagcgaggcacaaactcgtcccatacagggattcggcttttcagcgagatgcctaaatcgccatgcatcaccccccagatataatggaggtactgctgccacatcggtttatcaagaccgagttcagccagcagttgagcatgacgctcaggggaaatacctcgctcacccgccatgatcatcaccggatcgccggggatcatgtggacaaaggcaaaggtgagaagggtaataccgataaacgtcgggataacgagtcccaaacgtcggagaatgaactgcaacataacccgaattctctctcatgacccacggcctggaaccgtgagtctgtattgctcacaaatcttatcccacgcaaactgcatcgcggataaagcattacgccggatggcgctgcgcttatccggcctacacaacaccggggcgcagcgctcttttaattattcgacagagacgttttcgaagtgatgtttgcctaatggatcaaccacatagcctttaacttctttacgcactggctcataaaccgtggagtgagcgatgatcagcgctggcgcctggtcatgcatcacaacctgggcctgtttatagagctcaatacgcttgttgtggtcatcggtcgcacgcgcaggctgaatcaggtcttcaaacggcttataacaccattttgaatagttggagccttgctgggcggcatcgcagctgaacagcgtggcgaagaagttatccggatcgccattatcgccggtccagcccatcatcaccgtctggtgctcgccatctttagcgcgcttgaggtattcgccccattcataggtgacaattttggcctgaacgccaatcttcgcccaatccgcctggatcatttccgccatacgacgcgcattcgggttatagggacgctgtaccggcatcgcccacagatcgatggtgaagcctttttccagaccggcttctttcagcagcgccttcgctttttccggatcgtagccatagtctttaatatcgtcgttgtagccccacattgtcggcgggatcaggtttttcgccgcaacgcccgcgccctgataaacggctttgatgatggcctctttattcacggcataggtcaacgcctggcgaactttgacatcatccagcggttttttctgcacgttataggagagataacccacgttcagaccggcctgctccatcaggttgatgtttttatcttctttcatgcgcgcaatatccgccgggttcggatacggcatcacctgacattcgttcttctgcagtttggcgtaacgcacagaggcgtcaggcgtgatggagaagaccagacggtcaatctgcggcttcgtgccccagtagccgtcaaaggctttgtagagaatgcgggagtctttctgatattgcaccagttggaacgggccagtgccgaccgggttcagatccactttttccggcgtaccggctttcagcatgttgtcagcatattctttggaaagaatagaggcaaagtccatggctaaatcggcaaggaacggcgcttccggacgcgtcagcacaaactgcaccgtgtgatcgtcgaccttcttcacttcgctaatcagatccggcagccccatgccttcaaagtattcatagctgccgccagacactttatggtacgggttctgctcgtttttctgccggtcaaaagagaacacgacatcatcggcgttcagctcgcgcgtgggtttgaaatccttgctggattgccatttcacccctttacgtaggtggaacgtataggttttaccgtcttcgctgatatcccacttctcagcaagacccgggatcacttccgtggtgccggttttgaattcaaccagacggttatagataggtacggagctggcatcataggtggtgccagacgtaaagagctgtgggttaaagccttccggcgagccttctgaacaataaaccagggttttggcctgcacgcttgctgcaacggtcatggccaccaggctcaaaccaagcttcagcatccctgacttcttcaaggaaatactcattcttctgctccaattgtgatgtatgttgttttgccctttgcaaaggcttttaccgcccggccttttttgttttttacctggtcaggtcagtagtgagaggtggggattccgttcgcataatcgactgagttgcagtgcggattctccataaaatgcccctcattccctacaatctgtcaatagaatgtcaaaacgtcaatacaggtaaccagcttttacaacaacggtgagaattaacaaacaaagattaaaaaaagttcagaagggtattttcagcagggaaatttgtgctatggccagaaaggcagagttattcacttaatattttgcaacagttagtgattaacaattagacattaattgaaaaatttctttcgatatgttgattatctgagcgattaataccactaacgctaaaacgcacaggcgaaaatgctgaggttatccataagccgtgtgcaaaaaagagttatacggacgttgaaaaacaccatcgaatatgtcacaaaattgtaaataagtaggccgtcgtgcggcctaccgcgatcacaaaaactaacttttgaccctggcctgcgtgcgcttttcgctccagttaaacaacgagttcaccagaatcgccgtcaacgtccccgctgccatgccgttgccaaagaccatctgtacgcccgccgggaaattctgatacaggccgggtaccagtataggtagcattcccatggccagccccatcgccagcgcgtaggttttacccggcgtatgcagtggctcacgcgcaatcatatcaataccgataaccccgataatgctgaagacaatcaccgccgtaccgcacaccaccgaacctggcagacaggtcgccagacgtaccagcggcgcgaatatggcaatcaggattaacaatcctccggcagccgcagtcacgaaacgcgatttcacattagtggtgcgtaccaccccaatattttcgccggaggtgataattaaggaggtgccaaaaatcccccccagcagcgacattaccgcatcaccacgaatggtgcgtggaatcgcctgctgcacattttgcgtggaattgactatttccgcggtcgcaatcgtttgcccggttgcttcagccatagagatgaccgcgtaaatcagtaacggcagcgaggcggagagatcaaaaatcggccagccgaacggcaaaagctgtgggaaactaaacagcggcccgtgactcacaccgctaaaatcggtgctgcccagcgccattcccagcaacgttcccgctaaaaggccgaacatcaccgccagctggcgcaaaataccgctaaacgccagcgcgaaaatcagcgttatcaggatagtccccagcgataaaatgatactggttggatgagcgaagtcggcgctccctggctggccaatgatcaatccgccgtacaggcgaataaggttaatcgacaccattagcagcatgatgccaatgataaaagggggaaaatggtgcaggcagcggcggaaaatcggcaacgcgataaagtagaacagcgaggtcagaattacggcgccaatcgcggtctggatattggtctgtaaagcgatcgcaacgaaaatcgcaatcggcgcgccccccggtaccataataaacggcaaacgcgcgcccacccctttcacacccaggctttgcaaaatagcgcccagaccgcacatcagaaaggtcgcgctaagtaccgaggcggtcaccgtatcggtaaagtggagcgctttggcgatcagaaagacggaggtaatgggggtggcggcaacgaccagcacatgctgaagcgccaaaagtaaggtggtttgccagggtaatgcatcgttatccggcgtagtaaggccaggttgcggcatgattaactcccataaaacatcaaaaaaataaccgccagcgcgggctggcggtctgtattatttcaaccaactaatggcatcagcggcatagcgatgcgcacggaaggcgctgttctgttttccaggaataatgcctttactgaggtgctccggatattcattaaagaacggaatgatatattcccataccgtttcgccttccggggtgacttcaaacaggcggccaaacgccgattcacagataaaggtgttgccgttcgccagccgctgcgcgctccccatatacggcgagaaaaacgccggcgggaagatatcgcgatactgccaggtaatcgctttggtctgcggatcgaactccagcaccgtggaatgcggcgaggtgacgccgggacgcaggttgccgttatcgaaaaccagaatcgacccgttctccatctcaaccggcgtgtgctgctgcgctacgacttccggccctgcatgccagataaccttcccgctctctttatccacggcaatgacgccggaagtggtacgcaggctcatcagcaccaagccatcacgggtgacggacaggccgttaatcatcggccagtggcggcggtcgaaaatatcatgaatcgggaaatcttccggattcaaatgctcccaggcgcgccattcccagaccacttcaccgtcgcgattgacctctttgacgacgtcgctctgaatgatgccgtccggcgcatcgcggcgcgggtcgccgccggtaacacgggcggcgatatcggcaggcaacggcgacgcggcggtatacagcagattaccgttcgccaaccattgcgcatcatggtgatggtaaatatcttcgtaatgccagacgatttcgttatccggcgtcacttcgtagaagtcgccgccgtgccagagatcccacgccggatagaggttcgctgaagtgcggtggctgccgttataacccagattaccgttcggcagcagcaccgcatcacgcccggcgcgaaccggaagctgccactgatgcgcgacttcgccctgctcgtccaccaggtaaacccgcccttcggcggtttgcggcgcaaaaagcgtatagccgccaaagctcttcgccttatcagcgtagataaggcccgccagacggcgtccaagggtgaaagtcgaatcctgagttaagtgtgccacatcgcctcctgaggaataaatttgcgccaaaataccccattaaaacgttttaatgaagggttttttacgatcctcactgaaaaaaagcaaacgttaccgtctggtaaatatgctaccctgtgcgcaaattttcgcaggtcaggaagcagatggctgttcaaaataaaaaacgcgcaaagttgattgatgttgcccgccatgcaggcgtgtcgccagggacagtatccaatgcattgcacaacactcgctttgtcgagccgcagacgcgacggcgtattgaagaggccattgctgcgctcaactacacgccgaatattcgcgctcgccagttacgaaccggcaaaaccaataccattgctttgctctcttcggtgccgctggcgattgcctccggcgcatcacgactgggatttatgatggaggtggcgttaacgtccgcgatgatggcgctggaaaagcagcatgcgctgattctggtgccgccgggggcaaatccactggatgccgtcagctttgacgcggcgatcctgattgagccggcggagaacgacccgcagctccaggcgctggcgcaagcgggcattccctgcgtcaccattggccgcacgccggggaccgacacgcctgtgccgtgggttgagctgcactcggcggcaacagcacagcttctgctaacgcatctggagacctccggcgccagcaaatgtgcgttatttgtcggtaacactcggcgaacatcagttctggagagcgaagcggcttaccagcgctggtgcgcggggcgccaggcccccgtcgtctactctctcaatgaaagcgagggtgaaaatgccggctaccaggccgcgcagcagctattacaggcgcatcccgacgttgacggcgtgctggtgctgatcgatacctttgccagcggcgcggtacgcgctttccaggaacaggcagtcgctatcccggagcggatgcgcgtggtcacccgctatgatggtatccgcgcgcgcgaatcgctgccgccgctgacggctgtgaacatgcatcttgatgaggtggcgcgacaggcaatcacgctcctgtttgccgttttgtcgggtgagaagatcagctacagcgacgggatcatgcctgaactggtggtgagagcgtcaacctgccggtgatagaggatgactcgccactacgtggctcgccctgcgggccgttgctgacgcaacgttctctcgcttcgctcgagtcgaacctcttgcccccggaggttctcatcctcgtcagacttcagatacaaaaaaaccctgctcattgagcagggtttctgaatttggtcggtgatagaggattcgaacctccgaccccttcgtcccgaacgaagtgcgctaccaggctgcgccaatcaccgaatgcgggcgcatcttactgctcaggcgcacgcccgtcaatcccttagtcgcaaaatacaattcaatcggcgagaaagtcggcagacaacctacttcgcggcgactttctgcacatcgggaatatggcaccagttgttgttctggttaatgccgccattcggcgatgtataccccaggcagcccattatcgtatcgtatagctccacatgacgacgcggcactttgatctccgcctgctgtttcaggtgagcgaacatctgcgcatgttgcggactggcaagatatttatccgacatccataccagcatcggaacacggaattgctccggcggcgccatattgcgcggcgtaccgtgcaaatgttcgcgttcgttaatcgactcgccgtggtcagccgcgtagaacacaatcgcttttttatcacgtagctgatcgaacacactggtaataaagtgatccacataggtcacggagttatcgtaagagttgatcatctgcgctttcgtgcagccgctatcgaccccaatacattcgggcttccactgagcgtagctgcgcggataacgctgcgtatagttaaaatgcgatcccttggtatgcaggataatcagatgcttaccctccggattctgggcaagcgagttctgcatctcatcaatcaacagcatgtcatccaccgttttaccgcggttacgcggctcggcgccaatctgctcgcggtaagagatattatccgccatggtattgctatagaaccacatctcgctctgcatggcgtacagatcggaactgaatccgagctgtttgagtacggcaaaaacattctgctcttttaaggtacgctgcgggttattatccgccccgccttcccgtacaaacatacagcgtaaagaaagcttcgtcgcggtatcgcaggaatagccgcggaacgccgccagatttttttcctgcgccagcttcggcgtggtattacgctcgtagccgaaaatccccatgtgatcccaacgggtcgtctcaccgataatgaaaacgacgtaggtgtcatccccatctttcggcgcaacataggtaaatttcctggccgggtttattaacgaattattgtccgacgactcatctacctgcgcccaggcatacagccctaacgcagataaccagtttgagggcaggtaggagttcgccaccacgccgccatagctgggtaagtcgatgcctgtcgcccgttcaacctttttttgctgtatatccagcaggcgaataggcgcccacaccattacgcctgcgagtaccactacagcggcgctgcgaaaacgctgccccggcgtacgtagctggcgcaacaacgtgtagcgacagtggttactccagataaagatgagcggaagcacgctcacggcaatcagccacaatacaaagtgcagccccaccacctctttcgagagatcgatatcggtggtcataacagacgcaataatgccgtagccaatcaccacgttcaggaaggtcatgtaataactggcgccagcggaaaacagcaccaccagcgtggccagcacacgccagacgcgtcggccaaacagtgaaagaagacgaagtaagaagaaagtgaccagcaccgtggcgcccagttcgacaactgcggagaggcctttccaaatggtaaattcttgtgcataactgccgaaacggcggtaaaacacggcgcaattcataaacagaccgatatagagcgcaagcaagaaactaagtttctgttgcgtcatcgatttaatgtatctcatgcaaacaaaccctgggaatcgggataaaaacgacctgtacaacgattctttaatcaaacaggtaaatatgcggctaacgcagatgtaagaaagtctacaagcacggttaagtagaccacaagcagaggggaaagtggcaacggagagtgtgatcggagaagatttttacaaaaaatcactaaaaatggaaaagggccagcgaactggccctcagtgattattcgtatgtgacgctaaaattcaccgtcgcattcgctgtgccaacggtggcatccggcttaacaggcacatagctggcgatatagttcagcttgttcgtaccatcaaaccagacagtgtgttcgacaggcgtagagtcggtactggaggggtattgttgctccccaccagatgttttaatttttaacgccacgcccgtcgcgccgccgctatccagggcaaaaagcgaggggtcagtcgggtccggagaaccgtccatcgtaacgctggcctttgtggcatacgcgcaatcttttaagccgatgctaaagtttttctggttcagctctttacccacttttaccgggcgctgaagcaccacggtctccatattgacgtcgatactgtcgttttccagttcacaggtagccgccttaatagtaatggtaaagtggatatcaccagcagaaccgatattcgacggtgccgccatcgcggaagcggtaagcagtaaacacgctggcatcaaagcatgaaggtttttcatcctgcttactccacatcaatacgcatggtggcaattccctcgaaatccccggcggccggcaatttgccggtggtactgatagggtaagccgaaatggtcgttgaggcggtacggtgcgtgtcgtcaacaagacccgatacgctcagctcctgattaacactggcgtcatttggcaccaaaattttaccgttagcgccctcaatgacggcaccgatatccgggttgcccatgtcgatggcattcgaatcattagcgtttggcattccctcaatacgcaggaagatctttacgccatcggaaatattggtgcatttaaactgcagctctttggtgaatttcgtggcgttctttgcaacttgtcctttgcgatctttaaaatcagtggccttaaattccccaaacggaatttccagcgtgctgccgctggagagttcacagccctgaggtaccgtaattgaaccactgatatatacagacgacgcaggtatactgccatatacactgggtttctttgtcacaaaaaggtccattattttggtgctaggtataatactttcacccacaaacggatggagaatatagagcgataagtgacctttgccaccggatgtccatattgcatctttactacttgcattttgcgaacactgagagcggttgtttgtcaggttacctacggtgtgttaacgtattctcctcgtccccccgaaatcagtacatcgctcgcaatggcaatattattattgatctggtaataggagcgactctctatattcgtaacaaaggccagaggaaccacagccttaaataaggtgtcatttataagagaggtatcatcagggcattcacaggacatcgcataggttccacctaaattccagctatcgaaatctacgaaggtcgcacccgttgtgttctttgacgtatctgaaactgttttatttatggtggcactgaagatatgtgttccaccttcaggagtacatggtccaaaatctgccgctgccagcgcctgccccgaaaacagcaccgacccgcccaacaggcccgtaaacattatcaactttttcaacataatcgtttccttccctgttaccggcagacggcattcgccatcaccacgccggtattatcctgttgttccggcagcgtaaacgccacgcggcattgctgtgcctggtctttaccccagttcacctgaagggcacctttctccggcatcccgctgatataaagctgaccgtcttcacccacaatgctgctggactcttttgtggtatccagcagcgtggcggtagcaccaaacggcaccgctttgccattggcctgcgtcagattcatcagcacacgatagcccactcgggtatcgaagcgggcacgaacaatcgcgccgcgtgtcggcactacgttgacggaggcggtatccaggtcaacctggttgttcaggctgtcgcttcgcagtgagacttccgtttcacggtacggagtaaggtaaggtacgaccgcattacccatccagtccacttccacaccaccgttgttgatcacgtgcgcgccgcgcgcgcccggcgcggagataatggccatggattcacccagcggttgagaaagagtgataccttcgctatgggctatcacaccgccgcgcaaaccgtagttcacctgctggccgtcacggttgtagttgtaacccaggctggcgctacccacgccgccctggtaatccaggttcacgctgccgctgttacccacgccgttgctgccgtagccttcctgcacactatagttcaggttgtggtcttccagcgcggtgccgctcacccctaactgctggttggttcggccatgctgatcggtcgtgaggtggtagttactccacacgcgtcccagtggaatcgacatggagaatgacagtaaacgatcgctctcatcccactccgggcttttcgtccaggtgtaagcaacgctgtagttcacgcggccaatacggccgttataaccggcattcagcgaacgctgtttaccttcatcgttccagtagtcctgctgcgtgacgttaaaatagaccgagccccaggcgcccagttgctgcgtcacgttgccctgaatctgactacgtttgtggtactggctataagagctgtccgcatcgctgcgcacatccgtcgcttcctggaaggtgtaatagccgctggtcgaatacttgtaacccagcagacggaaatctgtaccgctgttaaagctcttggagtagaggaaacgataagactgaccttccgaattctcctcatttgccagcttgctttttgcctgggttacatcgatggagatcgcgccgatataaccgaagtttttacctaatcctcccgccagcgagtaatagtcgtcagagaagatcgcaccaccgtaaacggtaaagccatacggcaggccgtacatggcatcaagctgcccgaatttcggctcggcgctgttatagttcccggcacggtattccccggcggaaaggctgtatttgagatggccttcacgctggaggagcgccaccgaggagaacggctgaacgaacttctgctcactgccgtccgattctttaatggtgaccgtcaggtcgccgctgtttgaggttggatacaggtcgttaatttcaaacgcacccggctgaacaaacgtacggtaaataacgtagttgttctgctcaacggtaacttcggcgttacttttggcaataccccggatgacgggcgcaaacccgcgctggctgtcaggcagcatctcttcgtcggaagttaactgcacaccgcgcatctgaacgctgtcaaaaatatcaccggcagtggaggtatcccccaacgtcagctgtgatttcagcggtacaatggcacggcttaaggatgtgccaatgttatcccatgtgttgttaccgtcgtttcgcgtccaggtgctatagttacgtaaccgccatgcccccaggttcataccgctgcgcagattcagatagtagctgtcgctgttgtagctggtttcactgtcgtgtgcgtcatagctggcgttgctgccggaaaagttataatccaccagcagggcattcaccccttcgtcccactgcgattctggcaccgtaccgcgcgctgtctgcttcatcgcagcctgcgggaagctcatgatcagggtctggtctgcaaagtcgaaatggctggcggcctggggaataatgtcgtcaaaagcaacacaggcttcaggcggggccattttcagcgccgggaagctatcaatacgcacgcccatatcttcaagctgcacgcgacttaagcacggcaccagggattcacccatttttgcgcgctgcgcctctgtcgctgccttaaactccagggtgcgagactccattttttttcgttgaccaccaccgagacgcggtatttacctggcaggtgttcagctttattggattcatacattgaaaggtcaacgtgctgatcaatacccggcacatcctccagaaagcgcgggttaaatgttcccgcatacgcggggagcgtacccgctatcatcagcgcaagcgcagactgcgtgaaacgcgaggtcttattgcccagaggaagatgcgtccatgtcatagtaataatcctttaaaacgtgttagttaacgcgctgtgtcaacatgtcgccagcagtgccaaagtcattaataatgttgtatttaacttcgcttaccttgccggtgccggctggcagttcaatattcaatgagccttttgccggaaccattcccgttttttcaatatcacggccgttggcataaaatttattaaacgtcaggttaaaggcagatgggttttccactttgatctggttagcccctgcgctggtgaactgcagtttgttccagccgtccatgctattgcctttcaggcccgccgggcgatagaacagttttaagcgggtacgtacggcgatctgcagtacgtttttagcttccgcgtcttcacttttggcaggaatagcttttacgttaatccaataaacggactcgcgatcctgcggtaacgtgttcgtcgtattaacaatacgtaaaacgttatttttagtcgggcttaatttaaataacggtggagtgatgataaagggcgtctttttattaccgttagcatcatcaatccatgactgaatgagaaattcatccgtggtgcttttattatttaccgtaagagaagcttcctttctactaccgtcataaataacacgcgtgctgcttaatgccacgcctccggcaaaactgttttgagcaatcaacgccagcaccagtgctgtgcaagatatcaaacgtgagcggttcatgattctcttcctgagcctccgctggaaaaaatggcaacgggatttccgttgccattatgattgtctgtattaacgaaaattcgattattcgtaggacaggttgaagtccacttctgcgttaccgtaaccagtggttacagtatcttttgttgcaacgtagttagcggtgtagtacagcacggtctgaccagcagccaacgtagtggtggatttaccggtgttcatttcaacaagcttgttagcgttgtcgtagataccgatgcccacgccagttgccgcacctgcttcagtgttaacagaaaccagtgtcgcatcgtctgtatcaccaacgccattgaagcttacgttaactttggtattagaggtgatgtcacagtcttccagtttgatctggaaaggcttagaagaagacttgtcgccaatggctttgaagatatttttcttaacctgacccagcacaacttcctggttctgggagtcagtagaaacgacgcatggcgcgtcaacgatttcaccggtgaatttaatggtgccgtcaccagattcagcagcgaaagcagaagtggaaactacagcgagagcagacagagcaaaaacaacctttttcattaaaaactccatttatgacggtagataacagaacgcatccttaggattatctgcattctgtgaggaaatggagtgtatagaggtgggtattggatactataattagtatatataaaaataattgttagttaatcttaaaaagaatagaaatcaatatattacaaatggaatgtacataaatgtaattttttattaagaataaattaatataattaatatattatttcttcctattcataaataagttaaatgtcttccttatttattagacgtttttttaactacaattgattaggtatttgtgctaaataaaaaaaagggcaccaaatgggtgcgctgtacgcctggtgttgcatgtgttacgcagacgcttcgctaaccccctcccgctgcggctggcgaatagtggtggaaagtgccagcgagataattaacagcgcaaagataacgcagaaggttagcaccctacttccgccacaagagctgttatcactgcgtttcgattataatttttaagttaaaacctggcgctcacccccaaggtatacaaataatcgctatccgtagcgctattttccgcctgggaaaacgccgcatacgccgccaggtgcgggttaagtaacacgtccgcgcctacggtgacatccagccagtttcccgcctgatttcctgcggtcatacgactcaacccggactgcgctttccagatattctccccaaactgttggttatagctgatttgcgcccagggacggacatcgccgaactgcgagtttacccgccagcctaacgtactgacgctggcgtgccataacggatcggtaaacgctaatgtcgtcgcgctatcgccatattcgttatacattgatgacgtcgaaccgtcgtaatgcagcgccgcgaccggcccagtggtcacgcgtcgggaaagcggaaaattccagcccatactgataccgctggtcgcatcaagcggggtttcatccgccaggctaagcaccggccccaccgtattttgcgtagactgaatacgttcggccagtatgtcgttgtaattcggttggtgatcgctgtcccaggtatagcgttccgtcgtatgccccggagccgcttcagcgatatattcttgttgccaggcatatgtggtattgataaaaaacgagcaggccataaggcccgccagacaacgcaatgtccggcgaccacggcgttttcttacaatcatcaacgcgactccagagtagagccgaattcggcgatattattgtcattgaatgaaggatgtcgggcatcagccctgtattaactattgtccttttagcgggcccgtcaaggcgggttgaaggaaattttcgcggtaaccacaataacgaggaagtctatgcagcgttgcgactgggtcagccaggaccccctttatattgcctatcatgataacgagtggggcgtaccggaaactgacagcagaaagctgtttgaaatgatctgtcttgaaggtcaacaggccggtttatcctggatcaccgtgcttaaaaagagggagaactaccgcgcctgttttcatcagtttgatccggtacgcatcgcagctatgcaggaggaggatgtcgaacacctgctgcagaacacgggcatcatacgacatcgcggtaaaattcaggccattatcagtaacgcccgcgcctggcttgcgatggagcaaaacggcgagtctttcgccgattttgtctggtcattcgttgatggccagccgcagatcacccaggcggccagcctggatgagatccctacctcaacacctgcgtccgatgcgcttgctaaggcattgaaaaaacgcggtttcaagtttgtcggtacgactatctgttactcctttatgcaggcgtgcggactggtcaatgaccatattaccggctgtttttgccatccgggagaaaaacatgattcgcaaatcccagagtgaagacatggcgtctattctggcgctgtggatgaaaagtaccatttatgcccatccctttatcgaagaacgttactggcacgagagcgaagcaattgtacgcgacgtctatttacccgccgcgcaaacctgggtatgggaggaaaatggacaactgaaaggcttcgtcagcgtactggaagcccgttttgtcggggcgctgtttgtcgcccccgacgcgttaagacacggcattggcaaagcgcttctggaatatgtccagcaacgttttcctctgctgagccttgaggtttaccagaaaaatcaatccgccgtaaacttctaccatgcgcttggttttcgtattgaagatagcgcctggcaggaggataccgcccaccccacctggattatgagttggcaggcggatcaaacgccgtaagcggtagcgccgggccggtatatttctcaaaccagaccagcgcggtgttgcccgcacaaccgttccccagccgggaactgggaagatcttttgtcaggacgtttaccgcaccgtttttgcatatgccgcctgcggtaggttcagggtccggccatgcgccttcgtgaatacagatcacgccaggccgaattccgtcggtaacgaccgcgcccgccagaacctgcccgcgatgattccagacgcgtaccgtatcgccatcgacgattccgcgcgttgtcgcatcctgcggatgaatcgtcaccggttcgcgtccggccaccgcataccgctcccgtaacgaactgtagttaagctggctatgcagacggtgcgccggatgcgcggaaagtagctgaacctgccccgcatcggcgttcccgtgccactcatccggcgccagccacatcggatgaccgggacaatccgcataaccatagctggcaatgcgcgcagaatagatttcgattttgccgctggccgtttttagcggatggttatcaggatcgcggcgaaaatccgcgaagcgcacaaactgcgcgttggcgggattttccggcatctccagtaaacggttagcctgccagaatgcggcaaacggcggcagcgtcaccccctggctggcgccacgctgggcggcaatattgtagaaagtctccagccacgccagctcgctttttccttcggtgaaccgagcgtaaccgccggcttcccaccgttcgctcagttcagcaaaaacgtcaaaatcattccgcgcctcccaccggggcgacacgacctgcttcatcggcgccaaatgctgattgctatagtcgccggtcatggttaaatcgttacgctcatagctagtggtcgcaggcagaacaatatccgcgtgtttcgcggcggccgtccagaaacattccgagataacgaccagttccggtttttgccacgcgcgaatcagacggttggtatcctgatgatgggtaaagttcgcgccgcccgcccaccagataaaacgaatatccgggaagcggcgatccatcccattgtgttggtaaaacccaccggggttttccagcgcctcgacaatacgcgccaccggtattttatctaccgcatcgaccccgccagggatgcttccctgcatcgaggctaacacggcggcgcggcgcgtcgggtttccgccgttagcaaaatgataagaaaaaccaaacccgccgccaggcgtaccaatttgccccagcattgcggccagcgtaacgatcatccagtgcttttgctcgccgaactgctgacgctgcattccccagccagccatcaacatggtggtgttatgatgaaatatttctgccagttcgcggattttcaccgcagaaacgccgcaaatttccgccgcccattccgctgttttggccgtaccgtcggtcgtgcccaaaagatagtcggcgaagcggtcataacccgttgtgcagcgggcaaggaacgcttcatcctgccaaccgttttccaccagcgtatgggcgatccccaacattaacgccacatcggtgcccatatgcggggcgatccactccatcttatcgccaaaaaagtcgacgctttccgatcgcatcggatcgatgcagatcaggcgcttgccgctttgtcgcaacgccgcaaaatagtcgagcccctgttcatccgaggcattccaggcaattttcagagtattcagcgggttcgcgctccagagcaccaccacctcgctgtgttccagcaccaccggccagctagtctgctgctggtaaacctcgttgccacccaccacataaggcatgatagcctgcgccgcgccggtggaataatcgccaagatggccggtataccctcccgccagcgccatgtaacgctgcaatagtgtagccgctttatgcaatacgccgttcgaacgccaaccgtaggagccggcgaagatggacgatggcccataactttcgcgaatacgtttgtgctgagcgtggatcagatccagcgcgtcatcccaacttacgcgaacaaactcatcctgcccgcgtatgccttgcggcttatcgggagaagccaggaaccctttacgcaccatcgggaagcgaacccgcgttttactgtgcacctggtcatgcacaacggtttgcagggagttttggtgtgccgtcgggagttcgccatacgaggcaaaaatgcgttctccgtcggtttcaacgcggactggcccccagtgtgcggcggtcaataccgagtgacgcgatggtgcgtgggtcaatgttcgctcctgaattattgggattatttattttgccgatcaatgttacttacaaatttcagagttttccctggaattttcttcatgtgcagacgtcataatcaaccgccacggtcgctgtggtaaaaataaaaaagtgataaggatttaagatgaaaaaacgtgtatttgtgattgctgccatcgtgagcggcgccctggcagtatctggctgcacaacaaacccttacaccggcgaacgcgaagcaggtaaatccggcattggcgcgggtattggatcgctggtcggcgcaggcatcggcgcactctcctcctccaaaaaagatcgcggtaaaggcgcgctgattggcgcggcggctggcgcggcgctgggcggcggcgtgggttactacatggacgtacaggaagcgaaactgcgtgacaaaatgcggggcacaggcgttagcgtgacgcgaagcggcgataatatcattctgaatatgccgaataatgtcaccttcgacagcagcagcgcgacgctgaaaccggcaggcgctaacacgctgaccggcgtggcgatggtgctgaaagagtatcccaagaccgccgtcaatgtggtgggctacaccgacagcaccggtagccacgatctgaatatgcgtctgtcgcaacagcgtgctgactccgtcgccagttcgctgatcacccagggcgttgacgccagccgtatccgtaccagcggaatgggtccggcgaacccgatcgccagcaacagtacggcagaaggtaaagcgcaaaaccgccgcgtcgaaattaccttgagtccattgcagtaaactaccgtaccgggtaaggcggcatgctttacccggcctgcattattccctcgccagaccggatacacctcgcattattcggtattcattcaccatttaccacgatacggctgccgacaacgggaaaatcggctggtcgattattgctaagcgggttaataataagcctgttccggttggcgcatgccgcgcttaccttttgatttacggagagtcgcatgaagccgtccatcattctctacaaaaccctgcctgatgatttgctgcatcgcctggaggcgcattttaccgtcacccaggtaccgaacctgcatccggaaacggtagcgcaacacgcgcaggcatttgccagcgcgcaaggccttctgggcgccagcgaaaccgttaaccgcgcgctgctggaaaaaatgccggcgctacgcgcggcgtcaaccatctcggtgggatacgataatgtcgaggtggacgcccttactgcccgcaaaatagtcctgatgcacacgcctgccgttttgacggaaaccgttgccgatacggtgatggcattgatgctggccactgcccgccgcgtggtggacgtcgcagaacgggttaaggcgggtgaatggacagaaagcattggcccggcgtggtttggcgtcgatgtccatcacaaaacgctcggtatcgttgggatggggcgtatcgggatggcgctggcgcagcgagcgcactttgggtttaccatgccggttctctatcacgcccgtcggcggcatcaggaggcggaagaccggtttaacgcccgctactgcgatctggatacgttgttgcaggaggctgattttgtctgcgtgatcctgccgctaacggcagaaacgcgacatctgtttggcgcaacacagtttgccagaatgaaatcgtccgccatttttattaatgccggacgcggcccggtggtcgatgaaaacgcgctgattgccgcgctgcaaaacggtgaaatatatgcggcaggtctagatgtctttgaacaggaaccgctatctgtggattcgcccctgctgaacatgtctaatgtcgtcgcggtgccgcatattggctcggcaacgcatgagacgcgctacaacatgatggcctgtgcggtggataatttgattgatgcgctgcagggaaaaatagagaagaactgcgtcaatccgcaagcggcgggataacgctacaggcccgataagcgctggcttgcgcttatcgggcagactgtcattactgggtcgcgtttaccgccgccgtccaggcctgattaaacgcctgatgctgcgaggccaacggcccaatcaacgcattatattggctggcctgctgtgaggtcgggaactgaatgccgttcgcgacaaagctcacctgctcgccctgttgcgcaatataatcgcccacttgtaccaactgctgcgtaaagatctgcgccgccgggatcagcggctgcaaagcatctgccggcacggtgactacttttttgtagacctgatcaaacacaggtttcaggtcatcggcctgctttaacgcgccatgcgcggcatcagcctgcagttttgcattctgcaactgttgcgccagcacgcctaacgaaccatttgcctgccgcagcggctcgcgttgcgtcatataatcctgcggaacgcggatggcgttaacgctatcgaccaccgggcgcagaccggaatccatcgcctggtttacctgctgcgagtagccatacagtatcgcgtaatcagacacgaacggaccaaactgttttttctgatcggccgtcagcgttggtaaacgctctccgctacgcattgctgtattctgcaggaaatcgacaaacgctttgcgctgatcgccttctttatcaaaacacccgctcaggctaaacaccattaataacgccacaacaggcgcaaaccagcgagagcaggacttacctgtcgccattgttaatactcctttcacccaaaaatacgcacaacgacacctgcgtgcctgacggcttacaaggatagtccaggtcaggcttgcaggataccctttccacgcgatcttgtagcggaaaattatgtttatctgcatcaatgcttaatttgttattttattgttaatttttgacctgacactgcgataaaaaacgcggcaagaaagctttccagcggggagtgtaatatttttttaatctttacaattattttctgaaagacggatataccttcctggatcaaattgttagcgtcctaaaagtcgcgtagcgtaaggcatcgaaacgaatcgatagcgcttcctggcggcgcgtcgccccccacccgcaagtttcccgactattcttaagaggcttcgatgcatttcacgatcccgctgtgtgatttacaggagttctcaatggaatataaagatccgatgtttgagctgctgagcagcctggaacaaattgtttttaaagatgaaacgcgaaagatcaccctgacgcaaaaacccaatccttttaccgaatttgaacagttacggagaggaacgggactaaaaacagatgaattcgccagagcgctgggcgtaacggttgccatggttcaggaatgggaatcgaaacgcgaaaaacccacgccagcagagcttaaattaatgcgcctgatacaggcgaacccacgcttaagtaagcaattgatggagtaatttttacccctttctgtttttaacggtcctgcgtaaggaccgttttccccgcccgattactggcctggagaaataaagtaaaataaaagttgcatcgcccgccattacatgagttaatgtgctcaacggtttgacgtacagaccattaaagcagtttagtaaggcaagtcccttcaagagttatccattagatacccctcgtagtgcgcatttccttaacgcttaaaaaatctgtaaagcacgccataacgccgaaaggcacacttattttttaaaaggtaatacactatgtccggtaaaatgactggtatcgtaaaatggttcaacgctgataaaggcttcggctttattactcctgatgacggttctaaagacgtgttcgtacacttctccgctattcagaacgatggttacaaatctctggacgaaggtcagaaagtttccttcaccatcgaaagcggcgctaagggcccggcagctggcaacgtaaccagcctgtaagcttaaaaagctcagcattttgaatccctgcctgatggcggggattttttttattccaattcccccctctcccccagcataactttgcattactttaccctgcgtccctttgacctttcccttaggggaacccctatagtaggcagggagattgttcacaaggaattgaagttatgtcgaaatcatcatggttattacttttgggtttatgcgccagcggctccgcgcttgcggcatcctcagaatccgcttttctggcgcaacatgggctggcgggaaaaacggttgagcagatcgtggatacgattgatcagacgccgcagagccgtcctttgccttactccgcgtcgattaccagtaccgaactcaaattatctgacggagagcagatttatacgctgccgttaggcgacaaattctatctctcttttgcgccctatgaatggcggacacacccctgttttaaccacagcctttccggctgtcagggagaaatgccgaataaaccgttcactgtaaaagtgacagacagtaaaggcgctgtcatcgtacaaaaagagatgcaaagctatcgaaacggatttatcggtgtttggctaccgcgcaatatggaagggacgctggaagtaagctacaacggtaaaacggcgtcacatgccattgccaccagtgatgacagccagacctgtctgacggaattaccattacgttaaaaaaatgcccgataacataatgggttatcgggcctataaaacgccaacaagataaaattaacagagtgccttgagaatgcataacgccacaagaatggcagaggtgggctcactttgtactgaccccaaaaacctggacagattaaccgaggcatcagcgaaagagtccatttaatacatgggctcttttttgtttctggctataactaaataacattgtccgcaatcgaattatccattccgttgctttcttgcatcacgcggattcctgtctcatcaatattttgttcgtcgtattcttcctgaatttaaccttagacattctatcaaattatcgcttatagcgatttgaacataacagtctttgcattctattgagggagcctaaggaacaatgttcgctgctgagtttgtgatgatttgaaaccatggtgaatgtagaaatttttggcttcttcggtaagtgcatgaaccatgattgcacgtacaccaatattctcggcaacccgatagcaacgaagcactgcatcatgaagtaaatcagcaccaagcccttttccatggaatgagagatcgacagcaagacgggcaagtataatgacagggatgggatctggcatgttacgccgaaggttgcctgtcgcttctgtatggttgacgctaccggtggccagagagtaaaaaccggctacttgcttcgtgtctttcttgcacaccacaaatgttctggccgctccgagagcctggtttttgaggcccttttgcttcaaccagtcatcgagcacagcttcaccgctgacgaactcagctacctgatgaaaagcggacaaaggttctggtgctgttacacgtcccactgaggtttccttgccagcagtttttcgataacgggatcatctgcgaccggtgcatcaagcagattgatgaactcctcatattgctcatcgttaaagttaaatacacggcggtcaaggatcactttctcggcagcctggcaggccgtttccagaatgaaatctgtacgtgacttgtgaaggatttccgcagctgcatcaatgagcgcccgctgcgattccttagctctaaggttaagttgaacatctgatttcatgagacaccccttgtatagcatttgctttacaagaatagcacaaccaccatgtatagcaaacggtatacatcaagtcgtcgtttttcattttttgaatactgatgttcgctttgtgccagaagcggaaattgctcattgtagcggtttactgagttcaacaaggcaaaagaacaatgctgcctttctgcaggctgactattatttcgccaaacatttcctcatcagagcattttgtaatgtcactccacggcaaataggaaagcctcgctccactatatgaaagccgtgtcgtagaaagaacacttccgcagccttacttacatttgaagtaagttcactaattccacgctgtctggcttcctcatgaatgcaattcatcagtagtgtccctaccccctgtcttgaataggttcctgatacaaagaaatgatcaatgtatccatttggttgaacatctgcatatccagctatttcaccatccagctctacaacaaaaggttgtaattccttaatgtgattggcccatcgctccaggtcgatatctgctggggcccaagcatcaatttgttcacgtgtgtagtagtgtgatgcgatcgtatgtacagatgagaaaaaaactctgaataacgatatttcatccccattactgaaccttctgattttcataaaacctcattgtgagagttacttgtagaacaatactaatttttgtgaaatagggcgtccgttcctcgctcatagcagacatttgcgtgaccgtatccaccaacgttcaggtttcctgatagcatccctgtacagaccttgttaatttctgcctggatagctctttaggcgctattcaaccgggctgagtccgttaaatttaaggctaattcgtcgggtattgtagtatcgtatgtaatcctcaatagctatcttaagttcatcaatatccttaaatttactggtgtaaaaactttctgattttaaagtcccgaaaaaacattctgcacaggcattatcaaggcagttgcctttgcgggacatactttggatgatgccaaactctcgtaactgatactggtaccatcaatgacggtattgccagccctgatctgaatgaagaaccggattggtacccgcatcaagtctggcagtaccgccagcgttaatgtattcctgaaataattcttgccaatcaatagagataaccgcgtctatgagttacagaattattagcgaatcaactaatactatttatgttataaaaaaacctgcccgagagcaggtttttgtttatttaactgaacgcttattgaagtaacgaaatatccgcaacctgcaggaacagttcgcgtagtttcgacaacagcgtcaggcggttgatacggatatctttctcttccgcgttaaccatgacattttcgaagaattcatccaccggagcgcgcagagcagccagctcaatcaacgcttcctgataacgaccatcggcaaagtacggctgaagcttatcacgcagcacaaccagatgtctggccaactcaatttccgccgcttctttcagtacggaggcgtggacgatatcgttcagcggctcagtggctttcgccaggatgttggagacgcgcttgttcgccgccgccagcgcagaggcttcttccagggtgcggaaatgagacaccgccttcatgcgggcatcaaaatctgccggacgggtcggacgacgcgccagtaccgcctggatagtgtcgacggtgtaaccttcatcctgataccaggcgcggaagcgacccagcataaaatcgatcacatcatcgactacgttggcattggtcagcttgtcgccatacagacgcaccgcttcttcggtcagcgtttgcagatcaagagcgaggttcttctcaacgatgatgcgcagcacgcccagcgcggcacgacgcagcgcaaacgggtctttgtcgcctttcggatgctgaccaataccgaagatacccgccagagtatccatcttatcggcgatcgccagcgcgcaggccaccgggttagacggcaggtcatcaccggcaaagcgtggctgatactgttcgttcagcgccacggccacatcttccgcttcaccatcatggcgcgcgtagtgcatccccatcacgccctgggtgtcggtgaactcgaagaccatgttggtcatcaggtcgcacttggagagcaggcccgcacgagtggcgtggttgacgtcagcgccaatctgaccggcaatccagcccgccagcgcctgaatacggtcggtcttgtcgcgcagcgtgcccagctgttgctggaacagcacggtttgtagacgcggcagatggtcttccagacgttttttacggtcggtattgaagaagaattcagcatctgccagacgcggacgcaccactttctcgttaccggagataatctgggtcggatctttcgactcgatgttggcgacgaagataaagttcggcagcagcttgcccgcgttgtcataaaccgggaaatacttctggtcgcccttcatggtgtacaccagcgcttcggcaggcacggcgaggaatttctcttcgaatttcgccgtcaataccaccggccattccaccagcgaagctacttcttccagcaggctttcgctcaggtcggcattaccgccaatcttacgtgctgcttcttcagcgtccgctttgattttggctttacgcgcttcgtagtcggcaatgactttaccgcgctccagcagaatttgcgggtactggtcagcattgtcgatagtgaactccggctcacccataaagcggtggccgcgaatgacgcggtcagactgaatacccagaatagtcgccggaatgaccttatcgcccaacagcagggtcacggtgtgcaccggacgcacgaagtgtacgtcagacgcgccccagcgcatcagtttcgggatcggtagtttcgccagcgaggtggctaccatgttcggtaccagcgcttcggtactttcgcccttcacgtgggcacgatacagcagccattcgcctttgtcggtcttcagacgctcggcctgatcaacggtgatcccgcagccgcgcgcccagccttctgccgctttgctcggtttgccttcggcgtcaaacgcctgagcaatcgccggaccacgtttttcgacttcgcgatcgggctgagattcagcaagattcgccactttcagcgccagacggcgcggggcggcaaaccattcaacgttaccgtgcgcgaggccggcgttatccagctccgcagtgaagttcgcagcaaaggactcagccaaactgcgcagtgcttttggtggcagctcttcagtgccgatttccaccagaaaagttttctcagacatggccgcctcttacttgtctttgttgcacatcgggaagccgagggcttcacgggaagcataataagcctctgccactgctttggtcagggtgcgaatacgcaaaatgtagcgctgacgttcggtgacggagatagctttacgcgcatccagcaggttgaagctatgggcggctttcagaatacgctcgtaggccggcagcggcagcgggttttccagcgccagcagctgctgggcttctttttcatactgctcgaagcaggtgaataagaaatccacatcggcgtattcaaagttataggtggactgctccacttcgttttgatggaacacgtcgccgtaggtggttttacccagcgggccatcgctccagaccaggtcgtaaacgctgtccacgccctggatatacatcgccagacgttccagaccgtaggtgatttcaccggtcaccggcttgcactccaggccgccgacctgctggaagtaggtgaactgcgtcacttccatgccattcagccacacttcccagccgagtccccaggcgcccagcgtcgggttctcccagttatcttccacgaaacggatatcgtgaatggtcgggtccatacccagctctttcagagaaccgagatacagctcctgaatgttgtccggagacggcttaatcactacctggaactgatagtagtgctgtaagcggttcgggttttcgccgtagcggccatcggtcggacgacgagaaggctgcacataggcagtcgccatcggctctggccccagcgcgcgcaggcaggtcattggatgagaagttcccgcgccgacttccatgtccaatggttgaacaatggtgcagccctggcgagcccagtaatcctgtaaggtcaggatcaagccctggaaggtcctggtatcaaacttttgcatattatttcgtgctggatacgtgtggatttaaaggaaggagccagtatacccgctggatgcgagatatacagtatgaaaccggtttgtttagcgaaaattgccggatttcgcggcatcacacctcaccaggcgcggcttttaccgcatagaaagatgtaaaaactgcccatctgcatcaaaagagcagacaaaactctctttacggaaagtattaccacgcatctcatagttcccctgaaactgttcgaaaccggtaacagcaattttctgtgcgccagtattgtaacgctgcgccgcctgagctttacacaatgcttccatatccagcgtgcgtgttgggctcactttactctgctgggctttttgcgtcggtggaggtgtcgctgtgcatcccaccagagcgatggctatcatcacagaacagaaatacttcattatcatttttattaccgtctggtttgctggtcagtcttattattaaggtttgtgggtagcagacacattgtgcgaatctccttacgccatcacaagatgtagcgtagaaagtcggatttttccagtgagccaccgcgctggaactctattgaaacggaagctgaggaactgatgcagcctaaaattaactggattgataacctgcgagggatcgcctgtttaatggtagtgatgatccatactacaacgtggtacatcaccaacgcccacagcgtcagcccgctaaactgggatattgcgaatgtcctgaattcggcttcgcgcgttagcgttcccctgttttttatgatttcaggctatcttttttttggcgagcgctgcgcgcaaccgcggcattttttacgtatcgccctgtgccttatcttttacagcgttgtcgccctggcttacatttcactttttacttcgatcaacgtcgagctttcgctaaaaaatgtgctgcaaaaacccgtgttttaccacctgtggtttttctttgcgattacggtgatctacctggtatcgccattaatccaggtaaaaaacgtgagcggcaaaatgctcctgatgctgatggtgatcattggtattattgctaacccaaatactgtgccgcaaaaaatcggcggcgttgaatggttgcccatcaatctgtatatcagcggcgacacgttctactacattctctacggtatcctgggccgcgccattggaatgatggagacgcaaaagtcatcgctgacgcttatctgcactgccctgttcatcatcgcggtatttgttatttctcgcggcacattgcatgaattacgctggcgcggaaattttgccgatacctggtatctgtattgcggtcccatggtgtttatttgcgccgtctcactgttcacggtagttaaaaataagctgaatgcgcggacgttacctggactggggcttatctcccgccactcgttgggcatttatggtttccacgcactgattatccatgcgctacgtactaatggtctggagttaaaacgttggccgccgttagacatcgtgtgggtttttgccgcgacggtgacaggaagcctgctactttccatgctgttacagcgtattgataaacggaaatgggttagctaaacgacaatgatggctccggccatcattcatcatcactgtaggaagcgtaaagatcggttccatatatactgacccccagcgccaccagacacagtattttcagcgcgcccgccagcgccaggttaaatacgccgaccgcgaccatgccgatgccaagcaacagcaaagatttgcaacgagaaagcaagcggccatttcccgtgtgttcctggcgaattaagactggaaaaccacacatgacgattgccgcaaaaaaatatcccttttcgcttaatgtatgacagcctggccacagtcccaccaggtataccactgcaccgacaactaacattcccaggccgaatatccgtttcctgcgcgcaacgtgatcgtccatctcactctccttgtggttgtgtgagacacattaagcgaagaaatagcgatgaaaaaggcgcctgctcagcaataatataaaaatcagaaaacacacatacttacttcgatataattcaatagaattaatatttacgggaaatgcctttcagccaaaactgaaaggcattctgacttatgacatcaacggcaacagctgctgataaagtcgacggaaggtttcacgacgttgttgataaaccgcatgacgctgcgcatcaggataatgcgcctgctccagcggcaactgcggcaatacatcggcgagcggggtctgtttattcaccgcaatttgcgccagacgcgccgcgcccagcgctggccctacatcgccgccagtacgataatcaagctgtagcccgctaatatcagatagcatctgacgccagtattcgctgcgcgccccgccgccgataagcgtcacgctggcgggtttgacgccgcaggcgtgaagcacatccataccgtccgccaaagcatatcccacgccctccagtaccgcccgcgccagttccgccgggccatgctgatgggttaaaccaaagaaaacgccttttgcctgcggattattatgcggcgtgcgctcgccggacaggtacggcaaaaaccagatcgaatcggcatgctcatccgcctgctgtgcggcggcaatcagcgccgggacgttctcctgcccggtgagtttagccgcccagtccagacaagaggcggcgctcaacatcacagacattaaatgccagcgttccggcagcgcatggcaaaaactgtgtactgcgctctccggtttactcagaaagccgtcgctgacggcaaaatagacgcccgatgttccgagtgagagcatcgcctgtccggcatcgatcattcctacgccgaccgcgccagccgcattgtcgccgccgcccgccaccacaggtactgctggcattccccatgcgctggccacctccggcagcaacgttccggtaatgtcactaccttcaaataacgctggcatctgctgtcgggttaaatgacaggcgttgagcataacgtcgctccagtcgcgctttttcacgtccagccacatcgttcccgccgcatccgacatatcgctggcaaagacgcctgtcattcgcagccgcagaaaatctttcggcagcagaaccttgtctatctggtagaaaatatccggttcgtggcgctgcacccagactaatttgggcgcggtaaaaccgggcatcatcagattaccggttatcgcacgcgactgcggcacctgtttttccagccaggcgcactcttcgctacagcgtccgtcattccataaaatcgctggtcgcagaacctgctgacggctatcaagcaatgtcgcgccatgcatttgtccggcgatgcccaacgcccggacgccacttaacgactgttgccgacctaaacctttaaccgcacgatccgtcgcctgccaccactgctctggttcctgttccgaccataagggatgcggacgcgatacggtcagtttttcagtatgcgtagccagcacatcgccctgctcattcaacaggatagcttttacacccgatgtaccaagatcgatcccgatatacatagtgtgggttcctttactgaaagcgcccggcagcgctacgcttaccgggctaatcacgactacaggccgggctaacgcggagtcgcccggtagatagggttatttatcaaacagataacggttaaccagattttctaacagctcctgatgaccgctttgatgtactggcgccagattatgctgctccgcatactgcgccagttcgcctaaggagagttgtcctttcagaatctgctgacccagctcgccattccagccggcatagcgcttcgccacgcgtttatccagctcgccgtcttcaaccatacgcgcggcgattttcagcgacaacgccatcgtatccatcgcgccgatatgaccgtagaacagatcgtatttatcggtgctctggcgacgaactttggcgtcgaagttgagaccgcccgtcgtgaatccgcccgctttcaggatttcgtacatcaccagcgcgttctcttcaacgctaatcgggaactgatcggtatcccagcccagttgcgcatcgccgcggttggcgtcaacggagccaaaaatacccagcgcgatagcggttgcgatttcatggtggaacgaatggcccgccagcgtcgcgtggttcgcctcaatgttcactttgatctctttttccaggccgaactgtttgaggaagccatagaccgttgcaacgtcataatcatactgatgttttgtcggttcctgcggtttcggttcaatcagcagtgtgccctggaaacccattttatgtttgtgctcgaccaccatttgcataaagcggccaatctgttcgcgttcctggcgcagatcggtattcagcaacgtttcataaccttcgcgcccgccccacaggacgtaattttcgccgcccagtttatgcgtggcgttcattgccgtaaccacttgcgtcgctgcccagctaaagacttccggatccgggttagtggcggcgcctgcgccatagcgcgggttggtaaagcagttcgccgttccccacagcagttttacgccgctctgctcctgtttcgccgccagcacatccaccatctgcgcgaagttgtttttatattctttcaacgacgcgccttccggcgacacatccacgtcatggaagcagtaaaaaggcacattcagtttgtggaaaaattcaaacgccacatccgctttgcgtttcgccagctccagcgcttcgcccggttgctgccacggacgattaaacgcgcctacaccaaacatatccgcgccgttccagcagaaggtatgccagtaacaggccgcgaaacgcaggtgatcttccatacgtttacctaaaaccagctcgtcgggattgtaatgacgaaatgccagcgggttagtcgattgagggccttcatagcgaacacgatcgagttggtcaaaataagcctgcatagtgagctccataatcagataagacggcaagtaaacgacataacgtcatactggaatttcctgatttattgctcaattacgttatttcacaccgctattaagagaatccccaaatgtgctctggctctcaaaaaaacgctgaaaaccacagaagaaaaaagcgatcgcgatcgaatcctggcaaataaacaaaaaaccgtaatatatagataagaaatgacaattgtcatccgccgtttgctgtgatgaatttcgcataacgtttcaggcgcaaaataatttgtcatcattcgccagaccgttatgtcagccgttttgatagtatccatgagtccaggttcacttttgcaggatatatcctcatgtttgataaacgtcaccgtatcactctgttatttaacgcgaataaagcctatgaccgtcaggtagtggagggggtgggtgaatatttacaagcctcgcaatccgaatgggatatatttattgaggaagatttccgtgcccgtatcgataacattaaagagtggttaggcgacggcgttattgccgattacgatgatgacgatatcgcgcaattattggccgatgtcgacgtacccattgtcggggtcggcggttcttaccatcttgctgaaaattatcctgccgttcattacatcgccaccgataatcatgcgctcgttgaaagcgctttcctgcatttaaaagaaaaaggcgttaaccgcttcgtgttttacggtttgcccgactccagccgcaaacattgggcggcggaacgggaatacgcctttcgccagctggtcgccgaggaaaaataccgcggcgtagtctatcaggggctggaaaccgcgccggaaaactggcagcacgcgcaaaatcgcctcgccgactggcttcagacgctgccgccgcaaaccggcatcattgccgtaacggatgcccgcgcccgtcacgtattgcaggcctgcgaacacctgcatattcaggtgccggaaaaactttgcgttatcggtattgataacgaagagttaacccgttacctgtcgcgcgtcgcgctttcctccgtcgcgcagggggcgcggcaaatgggctatcaggcggcgaagctgctgcaccgtttgctggcgcgtgaagagatgcctttacagcgcattctggtgccgccggtgcgcgtcattgcgcgccgctcgacagactatcgctccctgaccgatccggcggttatccaggcgatgcactttattcgtaaccatgcctgtaagggcattaaagtcgagcaggtgctggacgcggttgggatttcacgttcaaacctggaaaaacgttttaaggaagaagttggcgagacgatacatgcgctgatccacgccgaaaagctggaaaaagcgcgtagtttgttgatttctaccacgttggcgataaacgaaatttcgcaaatgtgcggctacccgtcgctgcaatatttctattcggtgtttaaaaaggagtacgtcactacgccgaaggagtatcgcgaccagcatagtgaagcgttgttgtagtttatccagcctacagatgccttgtaagccggatagcgtagcgccatccggcacacagaattacatatgcgcggcgatcagacgctggttgtcctggtacatcgcgaacaagtagttgttatagcgcgacccctgggtagagtaacccttcagcttatgaatcatcgccgtggcggtgacttcctgatccgccttacgcagttgggcgcgcgacttgcggaaagaagaataagccggatgcgtgttcaggttggcgacatacgcgctcaccgactcctcaaccgacgcgaattgcgagtaacctttcaccttacccggcgtattggtacaacgccctttcgtgcacttcatgccgaacaggttattgttgctacgcgccagtttagaggttccccagccgctttccgccgccgccatcgtcgccaccatgctggttgggataatgtcgacgcgctccagcaacgtattccacggaatacgacgcgtgttgccggaccagctcactttatagcgcttcgcgatatctttcatacgcgcgcgttcagacggcgaccagcggttctggtactgttttgagatcagccaattacggtccgcggtaatcgcggcattttggctggtgatgtaaggcataacggtccggagaaacgctttttttctgggggttccggaagggtattttcgcaaatcaggaagtgaactgctctttgcactattgcgagaatactcttgtttactgctaacctgtttataacttgtctcagttatgtgggacttttgactcgtttgtgttgcgtgcgtctttgccagcacctcacccgaaaatgcgatggtgagtaacataagaatcattgccccatatcgtcgcatgggagtcaatatcattaggtctcctggtcggattgatacattccaacaccttttatttttcacgaagttgaggtttgaaccccaaattctagcaaaaataggcttaaaaagcacctcagggaatagtcttaatccgaaactatgtcaagtattaacgataacaggcagcaataatgccaataaaatgtggtgcttatcgcaaatagaggcgtttttttgcgcctcgtcgctcaccctcgcgtctcctcctgcgcgactctctgctgaggaggagttcattcgcctaaaaaccaggcaagctgatgaatattgcccacaaaggatagcgtgatgaaacttgccgccttcgctctgacgctgatacccggtatcgcgatcgcctcatcatggacctcacccggttttccgacgttctcgacgcaggaaaccgggcgctttaccagccatgctgcattaacaaaaggtacacgcgcgttaacgctccatattgaccagcagtgctggcagccctccggcgccataaaactcaaccaaatgttgtcgttaaaaccctgcgaaggcgcgccgccgcaatggcgtttgtttaaagatggcgactatacgataacggtagatacccgctccggtacgccgaccctgttgttatcgataaaaactgaacctgaacgcaccgcgcagctcgcctaccagtgtcccgtctgggatgggtcgccgctcacgctggatgttcgccaaacctttccggaagggacggtagtgcgcgattattacagtggtcaaaccgataccgtccaaaacgggcaaatcacgctgcaacctgccgacagccacgggcttttattgctggaacgcgcggaaacccatgcgccggcgccttttaactggcgcaacgccaccgtttattttgtgcttacggatcgctttcgcaatggcgatccaaccaacgaccacagctatagtcgccataaggatggtatgcaagagattggcactttccacggcggcgatttgcgcgggttgacgagtcaactggactatctacagcaattaggcgtgaacgccttgtggataagctcgccgtttgaacagatccacggctgggtcggcggcgggacaaaaggcgattttcctcattacgcctatcacggctattacactcaggactggacgacgctggatgccaatatgggcagcgaagccgatctccgcgcgctggtcgacggcgcgcaccagcgcggcatccgtattttatttgacgtagtaatgaatcatgccggttacgccacgctggcggatatgcaggagtatcagttcggcgcgctctatttatccggcgcggaacggcaaaaaattctcggcgatcgctggacaaactggcgacccgccgccggacaaagctggcacagctttaacgactacatcaacttcagcgacagcgccgcctgggaaaaatggtgggggaaaaagtggattcgtaccgatattggcgactacgacagtccgggatttgacgatttaaccctgtcgctggccttcctgccggatataaaaacggaatctaccacgccttccggtctacccgcgttctatgccaacaaacccgatactaaagcaaagttcattgagggctatacgccacgggattatctgactcactggttaagccagtgggtacatgattacggcattgacgggttccgggtcgatactgccaaaaacgttgagcttcctgcctggcaacagctaaaaacccaggccagcgcggcgttacgtgaatggaagcaggccaatccggacaaagcgctggataatagcccgttctggatgactggcgaagcgtggggccacggcgtcatgaaaagtgattattatcgctatggtttcgacgcgatgatcaattttgattatcaggagcaggcggcgaaagcggtcgattgcctggcggaaatggggccagtctggcagcagatgacggataaaatgcaggatttcaacgtattaagttacctctcctcgcatgatacgcgccttttccgtgagggcggtgataaggcggcggaactgctgctgctttcgccaggcgcggtgcagatcttttacggcgatgaatccgctcgtcccttcggccccaccggctccgacccgctgcaaggcacccgttcagatatgaactggcaggacgtgagcggaaagtcagccgcagccgtcgcgcactggcagcgtattagccagttccgcgccagacatcccgccatcggcgcaggccaacaaaccacgctgacgctaaaacacgggtacggttttgtacgccagtacggcgacgatacggtgatggtcgtctgggcgggccgccgctaatcgtggcgctaccggtctcctcgcgtaccggtagccccttcaaaacaaaaaactaacctgataaaaatttgtagcataaaacatcaacaccaccgcctgacccccatttgcgccccgccatttgtagcgttatggttatccactttgacagacagttcgatagatcacccgttatgacattttcacttttcggcgataaatttacccgccattcaggcattacccgcctgatggaggatctcaacgacggcttacgcacgccaggcgccatcatgcttggcggcggtaacccggcacacatccctgcaatgcaggattatttccagacgctactgacagatatggtagaaagcggcaaagccgctgatgcgctttgtaattatgacggtccccagggaaaaacggcgctactgaatgcactggccgtactgctacgtgaaacgctgggatgggatatcgaaccacagaatattgcgctgacaaatggcagtcagagcgcgtttttctacttatttaatctcttcgccggacgtcgcgccgacggcagtacgaaaaaggtactattcccgcttgcgccggaatacatcggctatgcagattccggtctggaagacgacctcttcgtttcggcgcggccgaatattgaactgctgccggaaggccagtttaagtatcacgtcgattttgagcatctgcacatcggcgaagaaacggggatgatttgcgtctcgcgcccaaccaacccaaccggtaacgttatcaccgacgaagagctgatgaagctggacagactggcgaatcagcacaacatcccactggtgattgataacgcttacggtgtaccgtttccgggcattatctttagcgaggcgcgcccgctgtggaaccccaatattatcctatgcatgagcctctcgaagctggggctgcccggttcccgctgcgggattatcatcgccaatgataagacgattaccgccattgccaacatgaacggcatcatcagccttgcgcccgggggcatgggcccggcgatgatgtgcgaaatgattaagcgtaacgatctgctgcggctgtcggaaacggttatcaaacctttctactatcagcgcgttcaacagacgatcgcgatcattcgtcgctatttatccgaagaacgctgcctgattcataaaccagaaggcgcaatatttttgtggctgtggtttaaagatctgccgattaccaccgagttactctatcaacgcttgaaagcgcgcggcgtgctgatggtgccgggccactatttctttcccggactggataaaccctggccgcacacacaccagtgtatgcggatgaactacgtgcctgaaccggacaaaatcgaggcgggcgtaaaaattctggcagaagagatagaacgcgcctggcgtgaaggctgacggttattccggccatcatgcaggccggaacgacgttcagaaaggttgagaatagaggcgctggcgctgcacgtgtgctgcgtcaacgcactgtaacgcactggtcgggcaggcttccacgcacgccggccccgcttcccgatgccagcaaagatcgcatttaatcgcctgcgcgcctgacgcggacgccaccacagtcatcgcgccaaacgggcaagccagcatacagcttttacaaccaatgcagcgcgatgacgtcacgaagatatgcccccgatcacggcgaatcgcctgtaccgggcagacatttgcgcacggcgcgtcctcacactgatggcagaccgtggccgtggtgaagctatcctcttttatcacccggatacgcggcacaaagtccgccgtcgtcaccgccgcgctattctgctgttcctggtgcgacaccacgcaggcgacctcgcaggtacgacacccgatacacgccgacgcatccgccataataaaccggttcattgttctccccctgcgttaaaacgccagaatgccagagagccattccccgccgctttgatcccactacgcaaacggacaaattttgtcagatgcctgataaaacctggcgagctgtcttattcgcgaacggtaaatcccagctcgttagagatagcctgtgcggtttcacgcaacggtttgagcagatttttctcgccgatctgttttagccgtgacgtcgacagtgaaatagaaatggcgtaaggcactcgatggtgaatatcaaacacaggcacagcaatacaggaaacgcctagttcattttcttcgcgatccatcgccatgctggtttcacgaatttgcgccagctcatcgtacattgctggtaaatcggtaatggtattacgagtcagcggctggatctgatctttatggctttcccagtaagacgccacataatccggctgaccaaacgccatataaattttccccatcgccgagcagtacagcggcatatgctggccaatgtaggcacgcgtgcgcagcataccggtggtcggttccagcttataaatcaggatagcgtggtcatcttcacggctggaaaaattcaccgtctcgccggtggtcaggttgagcgcctcaaggtgcggtgccgcaacgtggatgatattcagcgatgacagggctttttggccgacggcaataaactttgtcgtcagacggtagctcccggccgccggcgctggcgtcacatatccgcaggattgaagcccctgcaacaaacgatggacggtactcttgttcagccccgccagctccgacaggtgcgccagcgggcaaccgttcgggtagttactcaaaatttctatcaacatcaggccacgaaacaggctctgactccccgcaggcttctctttatcgttgttctggctcatcagaaaactctctcctttcttgggcgatcagatggtagctcaaagtgtgttgcagttcacgatatcagcataaaaaacataacccgatgattttaatcatttttaaaaaccttctctggcgttgccatgtcaatttttgatctatatatttggaactagatttcgcattatgaaatttatagacaaaaaaacatactaaaatttctaacaatcgaccaggagaacagggatgaaagtaactttcgaagagttaaaaggggccttctaccgcgtcttgcggtcgcggaatattgcggaagataccgccgacgagtgcgcggaaatgttcgctcgcaccaccgagtccggtgtctattcccacggcgtgaaccgctttcctcgcttcatccagcaactggataacggcgacattattcctgatgctaaaccgcagcgggttaccagcctcggcgccatcgaacagtgggatgctcagcgcgctatcggcaacctgacggcgaaaaagatgatggaccgggccatcgagctggcttccgatcatggtattggcctggtggcgttacgtaatgctaaccactggatgcgcggcggcagctacggctggcaggcggcggaaaaaggctatatcggcatttgctggaccaactccatcgccgtcatgccgccgtgggggcgaaagagtgccgtatcggtaccaatccgctgatcgtcgccatcccgtctacgccgatcacgatggtagatatgtcgatgtcgatgttctcctacggaatgttagaagttaaccgtctggcgggccgcgaactgccggtggacggcggtttcgacgataacggtcagttgaccaaagaaccgggcgttatcgagaaaaatcgccgcattttaccgatgggttactggaaaggatctggtctgtcgattgtgctggacatgattgccaccctgctttccaacggctcttccgttgccgaagtgacccaggaaaacagcgatgaatatggcgtctcgcagattttcatcgccatagaagtggataagctgatcgatggcgcaacccgcgacgccaaactgcagcggattatggatttcatcaccaccgctgaacgcgccgacgacaacgtcgcgattcggctgcccggccacgaatttaccaaactgctggatgacaaccgccgtcacggtatcaccattgacgacagcgtctgggctaaaattcaggcgctgtaaggagccacatcatgatttttggacatatcgcgcagcctgatccgtgccggttaccgtcggccatagagcaggcgctcgatttcctgcgtaatacggactttcgcacgctggaacctggcgtagtggaaatcgacggcaaaaatatcttcgcgcagattatcgatatgaccacccgcgatgctgctgaaaatcgtccggaagtccatcgccgctatctggatattcagtttctggcatggggtgaagagaaaattggggttgccattgataccggtaataatcaaatcagcgagtcattattagaacagcgcgatattattttttatcacgacagtgaacatgaatcattcattgaaatgataccgggaagttatgccctgtttttcccgcaggatgttcatcgtccaggttgtaataaaagcattgctacgccgatacggaaaatagtcgtaaaagtcgccatagacgttttataaaatagagtttactggagcacaaaatgaaaaataataccggttatattatcggtgcgtacccttgtgcaccctcatttcaccagaagagtgaagaggaagagacggaattctggcggcaactctctgatactccggatatccgggggctggagcagccttgtcttgaacatcttcacccgctcggcgacgagtggttattgcgccatacaccagggaactggcaaatcgtggtcaccgcgataatggaaaccatgcgccgccgtagcgaaaacggcggttttggattagcgtccagtgacgaggaacagcgtaaagcctgcgtggaatactaccgtcatctttatcagaagatcaataaaatcaatgggaacaataccggcaaagtcatagcccttgagcttcatgccgccccgctggcgggcaatccgaacgtggcgcaggcaaccgacgcctttgcgcgctcattaaaagagattgccaactgggactggtcctgcgacctggtgcttgaacactgcgacgcgatgaccggccccgcaccgcgcaaaggattcttaccgttggtaaacgtactggaaactattgccgactatgacataagcgtctgcattaactgggcgcgctcggctattgaagggcgggatacctctctaccgctgatccacacgcagcaggccaaacaggctggaaaactcggggcactgatgttctccggtacaacgctggatggagaatacggcgaatggcaggacctccatgctccgtttgcacctttctgtccacaaagtctgatgacggagaaacatgttaaagaactgattaccgccgccgctcccgaactgttgcagtttaccggtattaaattgttggaaatcaatgccagtgccgatattaatcaccgcataaatatattacgcgatggtattaacatgatgaaaaaggccacacgccgctaacctgaattaaacatcatcaccttaattctcggcctgcaactcaacgttgcgccgacctaatataaaccaaacataagaaattaagttccactattcagcatcgaaagaaataagtttctataacctgatggagtcgttatgaagcgggtacttgagggcatacttgcggtattaattgccgtactttcctgcattgtatttattaacgttattttacgttacggttttgagagcagtattttgtcggtagatgaactatcacgttatctatttgtatggctgacgtttattggcgccatcgttgcatttatggataacgctcacgttcaggtcacttttgtggtggaaaaactttcgccagcgaatcagcgtcgtctctcgctgctgacgcattcgctgattttattgttatgcatcgcattaggctggggcagcctgcaaaaagcgttgcaggactggagcgatcactcgccaatcctcggtttaccgatcggcctgatgtatatcgcctgtctgcccacaagcgttgccatcgcgttaatcgagctgcgtcggctttatcacttaataacgcgtaacgattcctttcaacaaccacagcaaggagcctaatcatggccgtggtgatatttctctgctgcctgctcggcgggatcgcgataggtttacccatcgcctggtcgctgctgctttgcggcgctgctctgatggcatacctggatatgtttgacgtgcagattatggcgcaaaccctggttaacggcgcggacagtttctccctactggccattcccttttttgttttggccggtgaaatcatgaacgcgggcggcctgtcaaagcgaattgtcgacctgccgatgaagctggtcggccataagcccggcggcctgggctacgtgggcgttattgcggcaatgattatggccagcctttccggctctgcggtagcagataccgctgcggtcgccgcgctgctggtgccgatgatgcgctccgcaaactacccgatcaaccgctccgttgggttaatcgcttccggcgggatcattgcgccaattattcccccctcgattccttttattatcttcggcgtttccagcggcttgtcgatcagcaagctgtttatggccgggatcgcaccgggcatcatgatgggcgcggcgcttatgctcacctggtggtggcaggccgggcgattaaatctcccttctcagcctaaagcaacaccgcgtgaaatctggcaatcattggtttcaggtatctgggcgctgtttttaccggtgattatcatcggcggcttccgttccggacttttcacgccaacggaggcaggggcggtcgccgcgttttacgccctctttgtcgccgtggttatctatcgggaattaacgttttccagtctctaccacgtgctggtcaatgccgccaaaacgacgtcagtcgtcatgtttctggtggctgcggcccaggtatccgcctggctgattacgatcgcggaattacccatgatggtgtcagatttgctgcagccgctggtcgactctccgcgactcttatttatcgtcattatgatctcaattatggtcgtcggtatggtgatggatttgacgccaacggtgttaattcttacccctgtattattgccattagttaaagaagccaatattgacccgatttatttcggcgtcatgttcattattaactgctctattggattaatcacaccgcccgttggcaacgtcctcaacgttatttccggggtagcaaaattgaaatttgatgacgcggtaagaggcgtattcccttacgttgtcgtcctgatgtcgctgctggttttatttatttttattcccgagctaattatcacaccgcttaaatggattaattaaaggataatattatgaaattacacgttattgctcgttcattattgatagctggtctgacggttttcagcgtgtcgtctctggcggcgcaatctttacgttttggttatgaaacaccgcaaactgactcccaacatattgccgcgaaaaaatttaacgaactattaaaagaaaaaactaacggcgaattaacgctaaaactctttcctgacagcacattaggtaacgcccaggcaatgatcagcggggtgcgcggcggaaccattgatatggaaatgtccggttcgaacaatttcaccggcctggcccctgtattcaacttacttgatgtccccttcctgtttcgcgataccgcgcatgcgcataaaacgctcgacggcaaagtcggcgatgaactgaaaaaatcactcgattcaaaagggttaaaagtgctggcctactgggaaaacggctggcgcgacgtcaccaactcccgcgcgccggtaaaaacgccgggcgatttgaaaggcttaaaaatccgcactaacaacagcccaatgaatatcgcggcctttaaaatcttcggcgcgaaccctattccgatgccattctccgaagtctataccggcctcgaaacccgtacgattgatgcccaggaacaccctatcaacgtcgtgtggtcagcgaaattctatgaggtacagaaatacctctccctcactcatcacgcctattcgcctctgctgctggtgatcaataaagccaaattcgacgctttaagcccgcagttccaggaggcactgctgagttccgccaaagaagcgggtgactatcagcgcaaactggtcgccgaagatcagcaaaaaattatcgatggcatgaaagaagccgaagttgaagtcctgaccgatatcgaccgtaaagccttcagcgatgcgctgggcagccaggtgcgcgatatgttcctgaaagacaacccgcagggcgccgatctcctgaaagccgtggacgaggtgcaataagtcatgagcaactactggctggggttagattgtggtgggagttggctaaaagccgggttgtacgatggcgcaggccgggaagtagcggtgcaacgcctgccgctgcacgctttaagcccgcagccaggctgggttgaacgcgatatgaccgagctgtggcaacagtgcgcctcggtcatcagcaaactgctggcgcacacgggggtgagcggctcacaaatccgcggtctgggtatttccgctcagggtaagggcctgttcctgttagataaaagcgatcggccattaggtaaagcgatactctcttccgaccgtcgcgccatggaaattgtccagcgctggcaaaaagaagcggttccgcaaaaactctacccgctgacccggcaaaccctgtggaccgggcatccagtctcccttttacgctgggtaaaagagaatgagccgcagcgctacgcgcagataggctgcgtcatgatgacgcatgactatctgcgctggtgcttaaccggcgtgaaaggctgtgaggagagcaacatctccgagtccaacctctacaacatggcgacgggccagtacgacccgcgtctgaccgagtggctgggcatcagtgaaatcgacagcgcgctgtcccccgtggtgggttcagccgaaatatgcggggagatcaccgctcaggcagccgccatcaccggtctggcggcgggtacccccgtcgtcggcggcctgtttgatgtggtttccaccgccctttgcgccggtattgaggatgaatcgaccctcaatgcggtgatgggcacctgggccgtcaccagcggcatcgctcacggcctgcgcgaccatgaggcccacccttacgtctatggccgctacgtcaatgacgggcagtatatcgttcacgaagccagcccgacctcctccggcaaccttgaatggtttaccgcccagtggggcgacctctcttttgacgagatcaatcaggcggtcgccagcctgccgaaagccggtagcgaccttttttttctgccgtttctctacggcagcaatgccggactggagatgacctgcggtttttacggcatgcaggcgctgcacaaccgcgcgcacctgctacaggcgctctatgaaggcgtggtcttcagccatatgacccacctcaaccgcatgcgtgaacgctttaccgaggtttgcgccctgcgcgttaccggcggcccggcccactccgacgtctggatgcagatgctggcggacgtcagcggtttacgcattgagctgccgcaggtggaggagaccggctgcttcggcgcggcgctggctgcccgcgtcggcaccggcgtatatcgcgatttccgcgaggcccaacgcgacctgcagcacccggtgcgcacgctgctgccggacatgaccgcgcacgccctctaccagcgcaaataccgccaataccaggatttgattgaagcactacagggctatcacgcccgtattaaggagcgcgcattatgagccgaccattactgcaactggcgctcgaccacaccagtctggaagcagcccaacgcgatgtcgccctgctacaggatcatgtcgatatcgttgaggccggaaccatcctttgtttaaccgaaggccttagcgcggtgaaagccctgcgagcgcagtgcccggaaaaaatcatcgtcgccgactggaaagtggccgatgccggtgaaaccctggcgcagcaggcttttggcgctggcgctaactggatgactatcatctgcgccgcgccgctcgcgaccgtcgagaaaggccatgccgtcgcgcaatcctgcggcggtgaaattcaaatggagctgttcggcaactggacgctggacgacgcccgagactggtatcgcaccggcgtgcgtcaggcgatttatcatcgcggacgcgatgcgcaggccagcgggcaacagtggggagaagcggacctggcacgcatgaaggcgttgtccgacatcggccttgaactatcgattaccggcggcattaccccagcggatctgccgctgttccgcgacattaacgttaaggcatttatcgccggacgtgcgctggcaggtgccgcccatccggcgcaggtcgccgccgaattccacgcccaaattgacgccatttggggagaaaagcatgcgtaatcatccattaggtatttacgagaaagcactggcgaaagacctcagttggccagagcggctggtgctggcaaaaagctgcggttttgattttgtcgagatgtcggtggatgaaaccgacgaacgcctttctcgcctggagtggacgccagcccaacgcgcatcgctggtgaacgcgatgctggaaagcggcgtcgctatcccgtcaatgtgtctctccgcccatcgccgtttcccttttggcagccgcgacgaagcggtacgccagcgggcgcgtgaaatcatgaccaaagccattcgcctggcgcgcgacctggggatccgcaccatccagttggcaggttacgacgtctattacgaagagcacgacgaaggcacccagcaacgtttcgccgaagggctggcgtgggcggtggaacaggccgcagcggcgcaggtgatgctggcggtggagatcatggataccgcgtttatgaactccatcagcaagtggaaaaagtgggacgagatgctttcgtcaccgtggttcaccgtttatccagacgtcggcaacctcagcgcctgggggaacgacgtgaccgccgagctgaagctgggtattgaccgtatcgccgctatccacctgaaagacacgctgccggtgaccggtgacagccccggccagttccgcgacgtgccgtttggcgaaggatgcgttgattttgtcggcatcttcaaaacgctgcatgagctgaattatcgcggttcatttctgattgagatgtggacagagaaagccagcgagccggtgctggaaattatccaggcccgacgctggattgaatcacggatgcaggaaggaggtttcacatgttagagcaactgaaagccgaggtgctggcggccaacctggccctcccggcgcacgggctggtcacctttacctggggcaacgtcagcgcggtcgatgagacgcgcaaactgatggtcatcaagccttccggcgttgaatatgaggtgatgaccgccgacgatatggtggtggtagagatcgccagcggtaaggtcgttgaaggccataaaaaaccgtcgtccgataccgcgacccatctggcgctctatcgccgctatccgcagatcggtgggatcgtgcatacccattcccgccatgcgacgatctggtcgcaggccgggctcgatctgcccgcctggggcaccacccacgccgactatttctatggcgcgatcccctgtacccggctgatgaccgttgaggaaattaacggcgagtacgagtatcagaccggcgaggtgattattaaaacctttgaagagcgcggtctcgatccggcgcaaatcccggcggtattggttcattcgcacggcccgtttgcctggggtaaaaatgccgccgatgccgtccacaacgccgtggtgcttgaggagtgtgcctatatggggctgttctcgcgccagctggccccgcagctaccggatatgcagcctgaactgctcgataaacactatctgcgtaaacacggcgcgaatgcctattacgggcagtaatgccggcagccacagcctgtgtcagatggcggctgcgccttatccgacctacaagatttgcaatatcaatacgttgtgatgaactcttgtaggcccgataagcaaagcgccatcgggcattcagtttgcaaccgctttgtcagagggccaaagattatactcaagaattaacgtgttccttactgtagcgccgcttccaggcggtaggcgtcaggccggtgtgcttgcggaagatctggcgaaagtaaccaacgtcattaaaaccgcaccgttccgccacctcttttaacgaacgcgcgtcgctaatcagcaacttttccgcctcgcgcacccgctggcggtggatggcttccgttagcgtaaggtgaaatacccgccgataaacgcgtcccagataatccacattgcaatgcagttctttcgccagaaccgcgctggaaagcggcaggtgatagtgcgttcgaatcagctgctgcgctttccaggccagcgacacgccagcggcctcggcgttttcattctgccgggcgtcaacggtgagctgctgcaaaatcagcagcacgatgaactccagcgccgggctgcgctggtgcttttcctgctcgttcataaactggcgaaaaagcgcaatcagcgcctgcggatcggcaacctgggtatgctgcggcacggaaagatgcgtcagccagcgcgggtcgctgtccggcgctttgacctcaaaatggagccagtaaaatttaagatcggcgggaaactcctcaacgccaatatggcggcgatgcggccaaagcaacaggctttccccggcttcgacacagaaaacacattcttcttcctgaattttcaggcagcctttttccacaaatataatttcccacgattgcagacgcctggctggatgacgcccaataccgcgagaaataaataatccgccgttttggactttaatcggtaatgttatggataattcgagcattaatatgtcatttcccgctcattcagcaccgtatttcatattagcttttgattattaactaaaaatagtcatttcactcgatccatctcacatttttaaatgcgggtcggaatcgtcatctttttttactcttttatcgccttgtcgctcaccgctatctgggcaaaatgaatcaggtcataacgcgaaaataaaaattactgccataaaataccccgtcagcgaggaatatctatgacctctacagccttaaggagcacgaaatgaacgtactggaagtcgatctgcataaactgacggtcagcgatccgttcctcggacagtatcaacaactggttcgcgatgtggttattccttaccagtgggatgcgttaaacgatcgtattccagaggctgaacccagccatgccattgaaaatttccgcattgccgcaggccagcagacgggcgacttttacggcatggtctttcaggacagcgacgtggcgaaatggctggaagcggttgcctggtcactgtgccagaagcccgatccagcgcttgagaaaaccgccgatgaggtgattgaactggtggccgccgcgcagtgtgacgatggctatctcaatacgtactttacggcaaaagccccgcaagaacgctggagcaacctggcggagtgccatgagctttattgcgccgggcatctgattgaagcgggcgtcgccttctttcaggccaccggcaagcgtcggctgctagacgtcgtttgtcgcctggccgatcatatcgacagcactttcggccctggcgaaaatcagctgcacggctatccgggccacccggaaattgagctggcgctgatgcgtctgtatgaggtaacagagcagccgcgctatatgacgctggcaagctactttatcgggcagcgcggcgcccaaccgcacttctacgacgaagagtacgaaaaacgcggccaaacctcttactggcatacctacggcccggcgtggatggtcaaagacaaagcctacagccaggcgcatctgccaatttcgcagcagcagacggcaatcggccacgcggtacgttttgtctatctgatgactggcgtggcgcatctcgctcgcctgagcaacgatgaaggcaaacgccaggactgcctgcgtctgtggaaaaatatggcgcagcgtcagctgtatatcaccggaggcatcggttcccagagcagcggcgaagcctttagcagcgattacgatttaccgaatgattcggtctatgcggaaagttgcgcttcaatcggcctgatgatgttcgcccgccggatgctggaaatggaagccgatagccagtacgccgacgtgatggagcgcgcgctgtacaacaccgtcctcggtggtatggcgctggatggcaagcatttcttctacgtcaacccgctggaagtacatccaaaatcgttaaaattcaaccatatttacgatcacgttaagcccatccgccggcgctggtttggctgcgcctgctgcccgccgaacatcgcccgcgtgctcacctcccttggtcactacatctacacgccgcgtgcggatgcgctgtacatcaatatgtacgtgggtaacagcatggaaataccggttgaaaatggcgcgctcaaactgcgaatcagcgggaactacccgtggcatgagcaggtgaagatcgccatcgactctgtgcagccggtacgtcacacgctggcgctacgtctgccggactggtgccctgaggcaaaagtgacgctcaacgggctggatgtggagcaggatattcgcaaaggttatctgcatatccgtcgaacctggcaggagggcgatacgataaccctgacgctgccgatgccggttcgccgcgtgtatggcaatccgctggcgcgtcacgtcgccggtaaggttgccattcagcgcgggccgctggtctattgccttgagcaggccgataacggcgaagagctgcataatctgtggctaccgaaagagagtgagttccgggtctttgagggcaaagggctttttgcgcataagatgctgattcaggctgaaggcgagaagcaaagcgccccagatgcgcagcatcaggcgttgtggcactacgataacgcgccgtcatcgcgccagccgcagacgctaaccttcattccgtggtttagctgggccaaccgtggcgagggcgaaatgcggatttgggttaacgagcggtaatactgtgccggatggcggctgcgccttatccggcctacaatatttgcaatatcagtatattgcgataaattcttgtaggcccgataagcgaagcgccatcgggcattacctcttgcgtcagaacagccccagaggcttatcggaatagctcaccagcaggcacttggtttgctggtagtgttccagcatcatcttatgcgtttcgcgcccgatgcccgactgcttatagccgccgaacgcagcatgtgccggataggcgtgatagcagttggtccatacgcgcccggcctgaatgccgcgccccatcttataggccagattgccgttgcggctccagacgccggcgccgaggccatactgcgtatcgttagcgatttccagcgcctcctccatggttttaaaggtggttaccgccagcactgggccaaagatctcctcctgaaagacgcgcatattgttcttaccaaacagaatggtaggctcaaggtaatagccctctttaagttcgccatccagctccttgcgtcgcccaccggtcagaatatcggccccctcttttttaccgatatcgatataattgaggatagtctcaagctggccgtgggagacctgcgcccccatctgtgtaccgctatctagcgggttcccgctgcgaatgctctccacccggcgaatagcgcgttccataaagcgctcatagatggactcctggaccagcgcacggcttggacaggtacacacctcgccctggttaaaggcaaacagggcaaatccctccagcgctttatcaaagaacgcatcttcctcatccatcacgtcagcaaagaagatattgggcgatttaccgcctaactccagcgtcaccggaataatgttctgcgtggcgtactgcatgatctgttgacccacttccgtcgaaccggtaaacgccaccttcgcgatacgtttcgaggtcgccagatattcgccaatctcgccgcccgcgccgttcacgacgttgacgacgcccggcggtaacagatcgccaatgatttccatcaacagcaaaacggaaagcggcgtcaggcgtgccggtttaagcaccacgcagttacccgccgccagcgctggcgccattttccagcttgccatcaacaacggaaagttccacgggattatctgccccacgacgccaagcggttcgtgaaaatggtaggccacggtttcgctatcaacttcgctaatcccgccctcctgcgcacgtatacaggaggcgaaatagcggaaatgatcgatcgccagcggtacgtcggcggcgctggtttcacgaatcggtttaccgttatcccaggtttccgctgtcgccaacagttcgaggttttgttccatccgatcggcgatcttaaacaagatagcggcacggtcttgtactgacgtatgcgcccacttatctttcgccttatgcgcggcgtcgagcgctaaatcgatatcttttttaccggaggaagcgacttcacatagcggctggccggtcactggcgtcaggttttgataatattcgccgtcggcgggcgcaacccagtcaccaccaataaaattgtcatagcgggcttttaacttcagtgggtacccgtattcacctggctgaatacgtgttgaagggggattgttcgtcatgaccaactccttattgtaaaggtactccacaagggtagacggtgctggtgaatttttcgccaatgatttcccgctttacgacagcaatcacgaattactttcctttacgtttctccgtctggttttagccatactaaacaggtgcctgtttaacgtacggagaacactatgcagcaatatatcggtattgatgtgggaggaactcacgtcaaatatggcgtgattaacagtgacggcgaagaattaacccatcatcaattcgatacgccagaggacgcctccacgtttacccgcaaatggcaggatgtggtggcgcgttgccaacaggactatgacattgcggcaatcggggtcagtttccctggccatattaatccccataacggtcatgcggcaaaagcgggcgcgctggcttacctggatgacgtcaacctgatggagttgttcagcgggctgaccgatctgccgctggtcgtggagaacgacgcgaactgtgcggcgctgggcgaaatgtggcgaggtgccgggcagcattatgaaaacatggtctgcattaccattggaaccggcattggcggcggtattatcgtcggacgagaactgtatcgcggcgcgcattttcacgccggtgaattcggcgtcatgccggtcgggaacaatggcgaaagtatgcataaaatcgcgtcaaccagcggattaatggcgtcgtgccgccaggcgctggcgctgcctgccgaagagatgccgcctgcggatgtgatcttcgaacgaatggcgaccgatgttcatctgcgtgaggcggtcaatgactgggcgcgttatctttcacgcggcgtttacagcgtgatctctatgtttgatccgggcgtggtgctgatcggcggaggaataagcgaacaggaaaagctctacccgctcctgacgcggcatcttgaaacgtttgaaatgtgggaggcgctccaggtgccgattcagccctgccaactgggaaatcaggcgggcaggctgggcgccgtctggctggcgcagcaaaagctcgaccgaggctaacgtgttacgccttatccggcctgcattgtctacgcaggcccggtaagcgtccgcgccaccgggcaaaggcgttacatcgccgtgcgataaagttccacaatctcatcgtgagtcgcctgaataaggcgcaaagaatacgggtgaaattatcctgataacaggttcacgctggctattttaagaagccagaaaaataaaaagcacatctggttcatttcctgatgtgctttttataaagcaacgcaataattgtattgcttcatttgttatttaatttaaccatttcattctttttgcggaaataataacgcatcacgtaataaatgatcattcccacgacgtcgtgtaaatccaatccggtcaaaatattcaaggatctgaatggccagtttccgccctacattcagcctgtcgcgaaaatccgccgcacaggttgatcctctctcttgatccagctcgcggatcatattggcgaaagcgacaatccgatcgttacgatagtaccgatcttttacgatcgcggtaatgatgccttgctgtgccgcctgccgcagcaccagccgcatcaattgttcttccgttccggtctctttcgccagatcgcgtacccaccagggttcatcgccaaatagcggttcgactttttgccagacggcctgctgctcatcgctaaatcccgctttatgatccggcagatgcaaccaaccgtgatggctatgaatcaggccgtcgtcgcgcatccgctcgatcagcatcagaaccagcgcttcatcctccatcggcagggccatgcggcgtaaacgctcgcgtcccggccccggttcatcgcggtgctgttcgtggtaggtcgccagcgtatcaagaatcttacgctgccagcgggcggcgacgggcgcgcttaacaaattgtctccagcctggataaaaccatgttgctcaataagctgacgcataccgagaggattaagctgacgcgcccaaccgaaatccggcaggttgacggcgccgcgttccagatgaatggccaacgccgcgctatcgtcctgcgcggcggcaagcgttgaaagccagtgcaaataatctggcttacgtttaccgcgacgcggcgccttaagcgtcaccacgcgtgcgccggcaagggtggcacgtgcggaaatatcacgcagcaccagtctgtcattatcggccagccacaacggcgtatcaaagatcagctcggccagcccgccttccagcaaagagacgcgaccggtcacatggctggcagcatggtgaatatgtagcggttgccattgggaaagcggcgcatgaagcgccagagaaacgatcacccgggaaaaagcctcccccaccggcgcatcggaaagcagccagtcgccgcggttaagctgctccttctccgcatcgcccgcaatattgagcgcaatacgttgcccggcatacgcatggtcagtgggctgattttgcgcgtgtagacttcgtacgcgcatcggcgtattaacgccggtcaaccatagcgtatcgcccacgtttacctctccgctcagcgccgttccggtcaccaccagtcccgcccctttcaccgtaaacgcacggtcgatagccaggcggaagcgatgctgcgcggcgtgcgaacgtgcaggaagctgctgtaaatgagcgcgaagttctgcaataccgcgtccttcattggcggcggtgacaaataaaacggtatcggcgaagccatagttgtcgagcgccgccagtacctcttcacgtacttcaccgatacgcgcctcgtccacgcgatcggctttggtcagcgcgacggtgagctggagattacccgtcagttgtaggatctgtaaatgctcgcgcgtttgcgccatgacgccgtcatcacaggcgaccaccagcaaagcgtgatcgataccgcctacgcccgccagcatgttagagaggaatttttcatgcccaggcacatcgataaagcccagcacacgaccatccggctgcggccaataggcgtagcccagatcgatagtcatcccgcgttttttctcttccggcaggcgatcggcattgaccccggtaatcgcctggagcaacgtcgttttaccgtggtctacgtgtccggcagttgcaataatcatttcagcatcatctccataaaccggctttcgtcttcaagacagcgcatatccagccataaacggccatcataaattcggccaatgaccggtacaggcagcatgcgccagcgggccgccagcgcctccagccgactaccgcgcccgtcgtgcggggtaaaggtcatggcggcgctgggaaggcggtctaccggtaatgaaccgctgccgatttgcgacaggcagggtttaacctccagcgcaaattcatcgccgtaacgtgccgccagccgcgcctgtaaccgctgcgcttgttcgcgaatcgacgcttcgctgcgggttaacagacgcagcgtgggtaatttctccgccaacgcttccgggtgcagatacagacgtaacgttgcctccagcgccgccagcgtcattttatccgcacgcagggcgcgtttcagcggatggctttgcagttgggcaatcatcgcttttttgccgacgatgatcccggcctgcggcccgcccagcaacttatcgccggagaagcttaccaggctgacgcctgcggcaatgagctgctgcggcatcggctctttgggtaagccatattgacttaaatccaccagcgaaccgctgcccagatccgccaccaccggaatatccagctctcgcccgatttccgccagttccgcttcctctaccgttttggtaaagccctcaatgctgtaattactggtatgcaccttcatcaacagcccggtattttcatttaccgcctgacggtaatctttcgcgtgcgtccggttggtggtgcctacttcatgcagcgtacagcccgcctggcgcataacatccggaatacgaaacgcgccgccgatttcgaccagctcgccacgcgaaaccaccacctctttgccgctggcggtcgctgccagcatcagcaataccgccgccgcattgttattgacgatacaggcgtcctccgccccggtgatacggcataacagcgtcgccaatgcccggtcgcgatgcccccgcccggcgccatccaaatcgtattccagcgtcaccggcgcgcgcatcgcctgcgttaccgcctcaatcgcttcttgcgcctgcaatgcgcggccaagattggtgtgcaacaccgtccccgtcaggttaatcaccgggcgcagcgcgctttgcgccgcattttccagccggagtttcgcctcttgcgcccagtctgcgtaccagtcgggaagcgtttgcgtattccggatgacgtcgcgcgcgtcgtcaaacatccgcctaagcagatcaaccacctgggtatggccataccgatcgcgcagagaaagaaaggcgctatcgtgcaataaacgatcgatagcaggaagctggctgtagagtgtacgcgtttcgcttgtcatgaaaatgcctggctgttggtggccctctcctggcgggagagggatatcgacataagggggattgtaacgtgagtttgctcaggcggacataatgcgcgtcaagcctttggcgcttcggtgcgggcaaagctttcgcgttgaaaaagcgtttcgaccagtttgaccaggtgggggcggctaacacaccagccaggcgcgacccggcggaagttgagatagcctaccgcacaggcaatcgcgatagtcgccagattgaccgtatccgtttttagcgtcccgtcgctcagataactttcgagcatatccaggctgcggttgattttttcccgctggcgcagcagttccgtttccgattgttgcgccgtcgggcgcgcctgttcgcgtacagacaccaacgctgcatccataatgccgtcagccaacgcttcaagctggcgaactttaagcgctgccatcgggtcacgcgggagcatcgctggcgcgatatccagcagttcaatatattccgcgatgatcggcgaatcgaaccagtactcccctttctccgtcaccagcgctggcaccttacccagagggttgtattgcgccacgccgttatccgcctcgtaaggtagttcattaataaattcgaaggtaatacccttttcgagcagcagaacagagattttgcgcacaaaagggctggtgtagctaccgatgagtttcatgccgtgtcctttttgccaaccagtaaaaatcatagtatggctcaaataagacgaaaagagacacaaaaggaggttgctgaatgacataacgtgagaggactcgcgacaaaatgtttgtcggatcgtattgacgttacccgggcttaaaatttcttgtgaagaggatcacaaaaattcaacaaagcaccaaaataaaaatgtgaaatatctcacataaaatggccttttaagggctaaaaattagattcgttgtttttttacacagccactttgtgatcaatatcacatcaattacctctctaccccctatatttatgtgacgcaaatcacataaattgtccctgtctggacagttgaacgattcagtgccagattgcgcagtatctacactacagggtccggctacctctgccgctacattaacaaacctcgggctttcagcctgcgcgacagcaacataagaaggggtgtttttatgtcatccgatattaagatcaaagtgcaaagctttggtcgattcctcagcaatatggtgatgcctaatatcggcgcgtttatcgcgtggggtattatcaccgcattatttattccaacagggtggttgcctaacgaaacgctggcgaaactggttggtccgatgatcacctacctgctgccgctgctcatcggttataccggcggtcgtctggttggcggcgaacgcggcggcgtagtgggcgctatcactaccatgggcgttattgtcggcgcggatatgccgatgttcctcggctcgatgatcgccggtccattaggcggctactgcattaagaaattcgacagttgggtagacggtaagatcaaatccggttttgagatgctggtgaacaacttctccgctggcattatcggtatgatcctcgccatcctggcgttcctcggtattggtccggcggttgaagtcctgtccaaaattctggcggcgggcgttaacttcatggtggcgcacgatatgctgccgctggcgtccatttttgttgaaccggcgaaaatcctgttcctcaataacgcgattaaccacggcatcttctcaccgctgggtatccagcagtcccatgaaatgggtaaatccatcttcttcctgattgaagctaacccgggtccggggatgggcgtcctgctggcgtacatgttcttcggtcgcggcagcgctaaacagtctgcgggcggcgcggccatcatccacttcctgggcggtatccacgaaatttacttcccgtacgtgctgatgaacccacgcctgattctggccgttatccttggcggtatgaccggcgtattcaccctgaccatcctgaacggcggtctggtctctccggcgtctccgggttccattctggcggtactggcgatgacgccaaaaggcgcttacttcgctaacatcgctgccatcgtggcggcaatggcggtctccttcgtggtttctgcaattctgctgaaaaccagcaaagtgaaagaagaagatgacattgaagcggccacccgtcgtatgcatgacatgaaagcggaatctaaaggcgcctctccgctggcggctggcgacgtgaccaacgacctgagccatgtgcgtaaaatcatcgtggcttgcgatgccggtatgggttccagcgcgatgggcgcaggggtactgcgtaagaaagtacaggatgcaggcctgagccagatctccgtcaccaacagcgccattaacaatctgccgccggatgtagatctggtcattactcaccgtgacctgaccgagcgcgcgatgcgtcaggtaccgcaggcgcagcatatttcgctgaccaacttcctggatagcggcctgtacaccagcctgaccgaacgtctggttgccgcacagcgccacaatactaatgaagagaaagtacgcgaccatctgaaagacagctttgaggagggtgataacaacctgttcaagctgggcgcggagaatatcttcctgggccgtaaagccgctaacaaagaagaggcgattcgctttgccggtgaacaactggtgaaaggcggctatgttgagccggaatacgtcgaagcgatgctggaccgcgaaaagctgacgccgacttacctcggtgaatccatcgcagttccgcacggcacggtggaagctaaagatcgcgtgctgaaaaccggcgtggtgttctgccagtatccggaaggcgtacgcttcggtgaagaagaagacgatattgcccgtctggtcattggtatcgccgcacgtaacaatgagcacatccaggtcatcactagcctgaccaacgcgctggatgatgaatccgtgatcgaacgtctggcgcacaccaccagcgtggatgaagtgctggaactgctggcaggtaaaaaagcttaacagttaagcatccccaaaatagttcgagctgcaggaaggcggcaacgcagtgaatccccaggagcgtacataagtacgtgactggggtgagcgaggagagccaacgcatctgcagttcgaaatatgaaggcgatatcctctcccttgtggagagggttaggttgagggaaaagcctcaccccagccctctcgggtaaaaacattaatgaaggttaatactatgaaagcattacattttggcgcaggtaatatcggtcgtggctttatcggcaaattgctggctgacgcggggatacaactgacgtttgcggatgtaaaccaggtcgtactcgatgccctgaatgcccgtcatagctatcaggttcatgttgtgggtgaaaatgagcaggtggataccgtttccggcgtcaacgctgtcagcagcatcggcgatgatgttgtcgacctgattgcccacgttgatttaatcaccactgccgtgggcccggtggtgcttgagcgtatcgctccggctatcgctaaagggctggtaaaacgtaaggcgcagggcgtggatgccccgctgaatatcatcgcctgtgaaaatatggtgcgcggcaccacgcagctgaaaggccacgtaatgaacgcgctggcggatggcgataaagcctgggttgaacagcacgtcggttttgtcgattccgccgttgaccgtattgtgccgccatctgcttctgcgaccaacgatccgctggaagtgacggtagaaacgttcagcgagtggattgtcgataaaacccagtttaaaggcgcgttgccaaacattccggggatggagttaacggataacctgatggcatttgtcgaacgtaaactcttcacgctgaacacaggtcatgctataaccgcgtacctcggcaaattagccggtcatcaaaccattcgcgacgctattctcgatgagagtattcgcgcggtggtgaaaggcgcgatggaagaaagcggcgcggtgctgatcaaacgctacggttttgatgccgacaaacatgcggcatacattcagaaaatcctcggtcgttttgaaaacccgtatctgaaagatgacgtcgaacgcgtaggtcgtcagccgctacgcaaactcagcgcgggcgaccgtctgatcaaaccgctgcttggcaccctggaatatggtctgccgcatgtaaatctggtcaaagggatcgcggcggcgatgcatttccgtagtgatgaagatccgcaggcgcaggagttggcggctctgattaccgaaaaaggcccgcaggccgcgctggcgcaaatttccgggctggatgccaatagcgatgtggtggcggaggcggttaacgcatataacgcgaccaaatgacgcagaatccggcgcaggttagcctgcgcccaaataacagattgtcagatatgcaggcaataatggaacaaacccaggcctttgaaaatcgtgtgcttgagcgtctgaatgctggcaaaaccgtaaggagcttcctgattaccgccgtcgagttattgaccgaggcggtgaatattctggtgcttcaggtgtttcgcaaagacgactatgccgtgaaatacgctgtggaaccgttgctggacggcgacgggccgctgggcgatctttcggtacgtctgaaacttatctatggcctgggcgtactcagccgcaccgaatatgaagatgcggagctgttaatggcgctgcgcgaagagctgaatcacgatggcaatgagtacgcctttaccgacgatgaaatcctcgggccgtttggcgaactgcactgcgtcatggcgctaccgccgccgccgcattttgatacgtccgacgcggcgctatacgccatgcaaattcagcgctaccagcaggcggtgcgttcgacgatggtcctctctctgaccgagctgatttctaaaatcagcttaaaaaaggcctttcaaaagtaaatcccgccgttaacctctttcttcttcttttggtcggtacagccgccggtaatattccagacgctgcaaataaatgggcgcgctctccgacggcacctcggaaggaacataatcacgcggcggcgttttattcaggtattcacggaacgcctggctggacgccataaaatcgacggctttatcaataagaagtggtacgttctcacctatttttgccatgatagatcctccatgtgggacccgcgtctgactcccgcggtcgcttatttgagtttaggatcaatttagcgttgtcattgaggaaaatgtgcttaatcgcttttcttgccgacaaaagggcgcttcatcttttctttcgacaaaaaggattttattctcaacgagataattaaataatgagcagtgtaatacttgccataattgattatctttacgtcatgagttgtgaagaatcactcactgcgcgcatactataaggtatctatcccatttctatcagaagctatcccatgaaagaagttgaaaaaaacgaaattaaacgcctgagcgatcgtcttgacgctattcgccaccagcaggcaggtctctctctggttgaatccgccgataaatacgcggagctggaaaaagaaaaagagacgctagaagcagaaattatccgtctgcgcgaagtacacagccagaaactgagtaaagaagcgcagaagctgatgaacctgccgtttcgccgcgcgatcactaaaaaagagcaggccgacatgggcaagttgaagaaaagcgtgcgtggcctgattgttgtccacccgatgacggcgctgggccgggaaatggggctcaaagagatgacaggtttcgcgaagagcgagttctaaaccttccgcatcccaggctctcaggacacccgttgtacggaggatgtcttgagagcatcgggctatattccgaatttttcatggaactatttacaccgcttatatacaagttcatttttaacggtagtccctgctttttcaggatgaaaaattccactatcatgcctgtttgtatttatacaatgaatttttttcatccccttttcttatatcccgcagaatatgattgacccgcaaaattaaataacattatcatccctgaaaaaaaatccccatacataaacattataattatatttttataaagcattgctatgagcaattgataaataacgtcgggtttttgcgcgcttctatagaagcgacgaatgttttcattctaaccatacgttaatgagttattggcaatactcgctgaatgatgagctagttgtataaataacaggttaactatttatattatataaattattaacaaggatatttcatatgcacaaaaatggaaaatttatccccctgcttgcgttgggattcacattctttttatctggttgtgattacttcgcagataaacaccttgttgaagaaatgaaagaacaacaaaaagaacaagaaacaaagataaacctgttagaaaaacaacaaaaagaacaagaagcaaagataaatctgttagaaaaacaacaagctacgattatcaacacaaccaaaaaggtcaccgaagtcgttggccgcgttgaacgcaaacaacggctattcgactatacagaactggacccatcacaaacgcactattttattattaacaacggcaatatcggattagccgggcgtattctatctattgagccaatagataatggaagtgttattcatcttgatttagttaacttactcagcattccggtatcaaaccttgcgtttaatatgacatggggtacgaaaaaaccttccgaggcaaaagatctgcctcgctggaaacaactcctgctcaacacgaaaatggactcgacaatcgaactcttaccgggagcatggacaaacgtcacgctaacattaaaaggcgtatcgcccaataatcttaagtatctaaaaataggtattgacatggagaatgtcatattcgacagcatacaacctattaacgatacaaaaaagaagccaaaaaaataatagccattgatacaattattttagaaaaggaaattactcattcatgaatagaatatttaaagtcctctggaatgccgctacgggaacatttgttgtcaccagcgaaaccgcaaaaagccgcggcaaaaaaaacggccgcagaaagctggcagtttccgcactcatcggtcttagcagcattatggtttctgcggatgcactggccaacgcaggaaacgatacaggcgacggcgttactccaacgggtacccagactggaggaaaagggtggattgcaattggtaccgatgccacagccaatacttacaccaacgttgatggcgcaagcgccgcaatgggttataaagcctccgcgatggggaaatggagtaccgccattggttcctacagccagtccaccggcgactcttcgttagcgcttggcgtaaaatcggtttcagccggtgaccgggccattgcaatgggcgcctcatcctcagccagtggaagttattcaatggcaatgggcgtgtatgccaattcgagcggcgcaaaatcggttgcgttaggttataaatctgtcgcgagcggagcaacttcctctgcattaggttatcaagctactgcgagcggcgacgacagcgctgcttttggtaatggcgcaaaagcgataggcaccaactcagttgcccttggctcgggctctgtcgcccaggaagacaattccgtcgccgtgggtaacagcaccactcagcggcagataacctacgttgctaaaggcgacatcaattccaccagtaccgatgccgttacaggtgcgcaaatttattctttaagtcaatccgtcgccgaccgactcggcggaggggcttccgttaatagtgatggtacagtgaatgcgcccctctacgaggtaggcacaggcatctacaataacgtaggtagtgcattaagcgcacttaacacgtctatcactaacacagaggcctctgtcgcaggattagccgaagacgcgctgttgtgggatgaaagcatcagcgcctttagcgctagccacacgggaaacgccagcaaaatcaccaatctggcggcgggtaccctggctgcggacagcaccgatgccgttaacggctctcagttgtttgatacaaatgagaaagtggataagaacactgctgatatcgccaccaataccggcagcatcaaccaaaacactgccgatattaccgctaataccgacagcattaaccagaacacaaccgatatcgccgccaatacgaccagcatcaatcagaacaccactgatatcgccaccaacaccaccaatatcaacagtctgagcgactccgtcaccacgctcaccgatgatgcactgctttgggatgcagcctctggcgcattcagcgctaagcacaacggaagcgacagcaaaatcaccaatctggcggcgggtaccctggccgctgacagcaccgacgccgttaacggctcccagttgtttgatacaaatgagaaagtggatcagaacaccgctgatatcaccaccaataccaacagcatcaatcagaacaccactgatattgccaccaacaccaccaatatcaacaacctgagcgattccatcaccacgctcaccgatgatgccctgttgtgggatgcagcctctggcgcattcagcgctaaccacaacggaagcgccagcaagatcacaaatctggcggcgggcaccctggccgcggacagcaccgatgcggtgaacggctcccagttgtttgccaccaacgaaaatgtgtctcagaacaccgctgatatcaccaccaataccaacagcatcaatcagaacaccactgatattgccaccaacaccaccagtatcaacaacctgagcgattccatcaccacgctcaccgatgatgccctgttatgggatgcagcctctggcacattcagcgccagccgtagcggaagcgccagcaagatcaccaatctggcggcgggcaccctggccgcggacagtacagacgcggtgaacggctcccagttgtatgaaaccaaccagaaggtggatcaaaacacctctgctatcgcagatattaatacgtccatcaccaatcttagctctgacaacctgagctggaatgaaacaacgagttcgttctctgccagccacggaagtagtacgacaaacaaaatcaccaacgttgctgccggagagctgtctgaagaaagtaccgacgcggttaacggatcgcagttgttcgaaaccaatgaaaaagtggatcagaacacgaccgatatcgccgccaataccaccaacatcactcagaacagcaccgcgattgagaacctgaatacttctgtctccgacattaatacgtccattaccggcctcactgataacgctctgttatgggacgaagacaccggcgctttcagcgcaaaccacggtggaagcaccagtaaaataaccaatgtcgccgccggggcgctttctgaggacagtacagacgcggtaaacggatcacagttgtatgaaaccaaccagaaggtggatcaaaacacctctgctatcgcggatatcaatacgtccatcaccaaccttggtaccgatgcactgagctgggatgacgaagagggtgcgttcagcgccagccacggtaccagcggtaccaataagataaccaatgtagcagcaggtgaaatcgccagtgacagtactgacgccgttaatggctctcagctctatgaaactaacatgctgatttctcagtataatgaatctattagccaactagccggcgataccagcgaaacctatatcacggaaaatggtaccggcgtgaaatacatccgtacgaatgataacgggcttgaaggccaggatgcatacgcaacgggtaacggcgcaacggcagtaggttacgacgccgtcgcctctggcgctggcagtctggctcttggccaaaacagcagcagcagcattgagggcagtatcgctttgggcagtggctccacctctaaccgcgctattacaaccggtatacgagaaacgagcgcaacaagcgatggcgtggtgattggctacaatacaacagacagagagttgctgggcgcgttgtcattggggacggatggagaaagctatcgtcaaattaccaacgttgctgacggctctgaagcgcaagatgcggtaacagttcgtcagttacaaaatgccattggtgcggtcactactacaccgaccaagtactaccacgcaaactcaacggaagaagattcactggctgtcggaactgactcactggcaatgggtgcgaagaccatcgtcaatgctgatgcaggtattggtattggtctgaatacactggtgatggctgatgccatcaacgggattgctatcggttctaacgcacgcgccaatcatgcaaacagtattgcaatgggtaatggttctcagaccactcgcggcgcacagactgactacaccgcctacaacatggacacaccgcagaactctgtcggtgagttctctgtcggcagtgaagacggccaacgtcagatcactaacgtcgcggcgggttcggcagataccgatgccgttaacgttggtcaattgaaagtaacggacgcgcaggtttccaggaatacccagagcattactaacctgaatactcaggtatcgaatctggatacccgcgtcaccaatatcgaaaacggcattggcgatatcgtcactaccggtagcaccaagtacttcaagaccaacaccgatggcgcagatgcaaatgcccagggtgcggacagcgtcgcgattggctctggctctattgctgccgctgaaaacagcgtggcgttaggcacaaattccgtcgcagatgaagctaatactgtgtctgtcggctcttctactcaacaacgccgtattaccaacgttgccgcaggggtgaacaacactgacgcggttaatgtggcgcaactgaaagcctcagaagcaggctccgtgcgttatgaaaccaatgcagatggctcggttaactacagtgtgctcaacctgggagacgggagtggcggcaccactcggatcggcaatgtttctgcggcggtgaatgatacggatgcggtgaactatgcgcaattgaaacgcagcgtcgaagaagcaaacacttataccgaccaaaaaatgggtgaaatgaacagcaaaatcaaaggcgtagaaaacaagatgagcggcggtatcgcctcagcgatggcgatggccggtctgccacaagcctacgccccgggcgccaacatgacctcgattgctggcggtacgtttaatggtgaaagtgccgtcgccattggtgtctccatggtaagtgaaagcgggggctgggtgtataaattgcaaggaaccagcaacagccagggcgattactctgcggccattggcgcgggcttccagtggtaatgaagtaacaacactcccgacatcaaaggcaatggcataatgccattgccttttcacttccctttgctgtcctctcccctcaattggccctaccaattttagccagttaccacagcctactcacatttcattaaattaactctacaataccgttgccaataaataacatctggttaactatttgttgtcattatccatacacaacaatattggcaggaccacttttacacataatgtgaccccaacgagatgagcaaagattcatcccattatgcgtgtggttctcaggagacctgcaatgaacctctggcaacaaaactatgacccggcgggtaatatctggctttccagcctgatcgcatcgctcccaatcctgttcttctttttcgccctgattaaactcaagctgaaaggctatgttgccgcttcgtggacggtggttatcgcgctcgccgtcgcgctgctgttctataaaatgccggtcgatcacgcgctggcatcggtcgtgtatggcttcttctacgggctatggccgatagcctggataatcatcgccgcggtctttgtctataaaatttcggtcaagaccgggcagtttgacattattcgctcgtcaattctgtcgattacccccgaccagcgtctgcaaatgctgattgtcggcttctgcttcggcgcgttccttgaaggcgcggcaggtttcggcgcgccggtggcgataaccgccgcgctgctggtgggtctgggctttaatccgctgtatgcggcagggctgtgcctgattgtaaacaccgcgccagtcgcctttggcgcgatggggatcccgattctggttgccggacaggtcacgggcctggacagctttgaaatcggtcagatggtcggtcgtcagctaccgttcctgaccattatcgtcctgttctggattatggcgattatggacggctggcgcggcgtgaaagaaacctggcctgcggtgatggtcgctggcggctcgtttgctatcgcccagtatctcagctccaactttatcgggccggaactgccggacatcatctcttcactggtgtctctggtgtgtctgacgctgttcctcaaacgctggcagccggtacgcatcttccgcttcggcgatatgggcgcgtcgcaggtcgatcagacgctggcccgcacccgctatacgacagggcaaattgttcgcgcctggtcgccgtttctgttcctgaccgccacggtcactctctggagcgtaccgccgtttaaagcgttgtttgcccccggcggcgcgctgtatgactgggtaattaacgttccggtaccgtatctcgataaactggtcgcccgtatgccgccggtcgtacacgaagcgaccgcttacgcggcggtgtataaatttgactggttctccgccaccggcacggcgatcctgtttgccgcgctgttgtctatcgtctggctgaaaatgaaaccctcagccgcaatccagacctttggcagcacgctgaaagagctggcgttgccgatttactccatcggcatggtgctggcgttcgcgtttatctcgaactattccgggctttcttccacgctggcgttagcgctggcgcacaccggcagcgccttcacgttcttctcgccgttcctcggctggctgggggtattcctgaccggctcggatacctcatctaacgcgctgtttgcctctctacaggctaccgcggcgcagcaaatcggcgtctctgatgtgctgatggtggcggcgaataccactggaggcgtaaccgggaagatgatctcgccgcagtctatcgccatcgcctgcgcggcggtggggctggtagggaaagagtccgatctgttccgttttaccgtcaaacacagcctgatcttcacctgtatggtgggcgtgatcactacgcttcaggcctatgttttaacctggatgattccgtgattgtgatgccaaaacgcctgtcagacgagattgcctctcgcgtgcgggcgctgattgaagaacaaaacctggaagcgggcatgaaattgcccgccgagcgccagttggctctacagcttggcgtatcacgcaactctttacgcgaagcgctggcgaagctggtcagtgaaggcgtgctggtgagtcgtcgcggcggcgggacatttgtccgctggcagcacgaaacctggtctgaacagaatatcgtgcaaccgctgaaaatgctgatggcgaacgatccggactacagtttcgacattctggaagcccgccacgccattgaagccagtacggcctggcacgccgccatgcgtgccaccgctgccgacaaagagaaaatcagactctgctttgatgcgacgctcagcgaagacccggatctcgcctcccaggccgacgtgcgctttcatctggcgatcgcggaagcctcgcacaatgtggtgctgttgcaaaccatgcgcggtttcttcgacgtcctgcaatcctccgtcaaacagagtcgccagcgtatgtatctcgttccgcccgtattctcaaagctgacggaacaacaccaggcagtgatggacgccattctggacggtaacgccgagggcgcgcgtaaagcgatgatggcgcacctcagttttgtccacaccacgattaaacgatttgatgaagaccaggcccgccaggcgcgtattacccgcctgcccggcgaccataatgagatgaccagggagaataaatcatgattatttcagcagccagcgattatcgcgccgcagctcagcgcacgttgcctcctttcctcttccactacatcgacggcggcgcgtatgcggaatataccctgcgccgaaatgtggaagacctgtcgcaagtcgctctgcgccagcgcgtgctgaaaaatatgtccgatttaagcctggaaacgaccctgtttaacgaaacgttgtcgatgccggtggcattagcgccggtaggcctgtgcggcatgtacgcccgtcgcggcgaagtacaggccgccgccgccgcagacgcaaagggcattccgttcaccctttccaccgtctccgtctgtccgattgaagaagttgcaccaaccattaagcgcccgatgtggttccagctttatgtactgcgtgaccggggctttatgcgcaacgcgctggaacgtgcaaaagcggcgggctgctccacgctggtctttaccgtggatatgccaacgccgggcgcgcgctaccgtgacgcccactccgggatgagcggcccaaacgcggccatgcgccgttactggcaggcggtgatgcaccctaaatgggcgtgggatgtcggcctgaacggtcgcccgcatgatttaggcaatatttccgcctatctgggtaaaccgaccggccttgaggactatatcggctggctggcaaataacttcgatccgtccatctcctggaaagatctggagtggatacgcgaattctgggacggcccaatggtgatcaaagggatcctcgatccagaagatgcccgcgatgcggtacgtttcggcgctgacggtatcgtggtgtcgaatcacggcggccgccagctcgatggcgtgctctcttccgcccgcgccctgcccgccattgccgatgcggtgaaaggcgatatcgccattctggcggatagcgggatccgtaacgggctggatgtcgtgcgtatgattgcgttgggggccgataccgtactgctgggtcgggcctatctctacgcgctggcgacggcaggaaaagcgggtgtcgccaacctgctggacctgattgagaaagagatgaaggtcgccatgaccctgaccggcgcgaaatccattagcgaaatcagtggcgattcactggtgcaggaactggggaaaagtttgcccgccgcgctggcgccaatgagcaaaggcgatgccgcctgaacgcctggcgcgtgagagcccggtaaatttctgctattctgcccccgcatttaagggggcatcatgcttaacatcgtactcttcgaaccagaaatcccgccgaataccggcaacatcattcgtctttgcgccaataccggctttcgtctgcacatcatcgaaccgatggggtttacctgggatgataagcgcttacgccgcgcagggctggactatcacgaattcgccgcggttcagcgccatcacgattatgccgcctttgtcgccgccgaaaatccgcagcgcctgtttgcgttgacgacaaagggcacgcccgcccatagcgccgtaagctatcaggatggcgattatttgatgtttggcccggaaacgcgcggcctgcccgccagcattctcgatgcgttgcctaaagagcagaagattcgcattccgatgatgccggatagccgtagcatgaacctgtcgaatgcggtgtcggtggtggtgtatgaagcgtggcgccagttaggatatcccggcgcggtattgcggtcgtaatatattcaatgccggatggcggctaacgcctgatccggcctggccgatcccgatggcatgttcccgtttatgcggactctcgcccaatcaaatgaaagccaatatccacaatagcttctgcgcacggtttctgttcaatacgatcggccaacagcgtagcggcgcgctggccaatggcgcgtctgtcaacgcttacggtagtaattgatggtcgattgctggcggcaaaatcaaggtcgccaaaaccaataaccgctaaatcatgcgggatgcgcaaaccacggctttccgcctccatcatcgccccctgtgccagggtatcagaactgcaaacaatgacatcaaacgtcccttcgtcaaaaagctggcttaaaccgctgcgccccagcgaaagcgatgccggaagggggacatctacctgcggtacggcatgaatagcgtggcgttgaagaacactacataacccctgcttacgttgcgcggctcggcgatcggcagtccacaacaagccgggacgacgatagcccttactcagaagatactcccccgtcgcctgcccgactttttcatgggaaaaaccgaccagcatatcaagcggcgtgggcgttaagtcccaaatttccaccaccggaatagccgcgttcaggatgacctttttcagttctatcgtgtgatggatcccggtaagcaccacgccatcggggcggcgggaaagcagtgtcgccaccaactccgcttccgtttgttcggtatatcccgccacgcacagcaatatgtgatatccgcgtcgggccagttcatcgctcagcgactggatggtatcgacaaacatgttgttgttaatttgcggcacgacgacagcgattaatttactccgtcgcgacgccagaccaccggctaacgcgttgggtatgtagcctgtgacgcgaaccgcctgcatgactttctcaaccgttttggggcgaaccagttgtggcgaattcaatgcccggctgactgtcatcggagacagcccggcgctacgtgctacatcttccagcgtcggcgcacgaggtgatttggttctcttcacgtctgatgcccctgcaaagattggctgatttatccgcgcattattcatcatgcctgcggctattgccagcttcgcatcaggaaaggccgtaaatacagtagcttatcaagctcagtcattacaaaatgatagcgccatcattttgtattatgcatttccccagatatttttggatcgtgatccattttgcaataaatcctgctttttatacgacatatgtgatcaaatgttcaaatcaacatcaactttctggatcctgcgttcgcttaataataaaaatgttagcgcaatcattttgtgattatcaggagaaaaaaaatggctttaagcgcgaattccgacgccgtaacgtatgcaaaagcggcgaataccagaaccgcggcagaaaccggcgatcgtatcgaatgggtgaagctatcactggcttttctaccgctggcgacgccagtgagtgacgcgaaggtactgaccgggcgccagaaacctttgaccgaagtggcaatcatcattgccgaaatccgcagtcgcgacggctttgagggcgttggttttagctactccaaacgtgctggcggccagggtatttatgctcacgccaaagagatagccgataatctactgggcgaagatcccaatgatatcgacaaaatatacaccaagctgctgtgggccggagcctcggtggggcgtagcgggatggcggtacaggctatctcccctatcgatatcgccttatgggatatgaaggctaaacgtgccggtctgccactggcaaaactgttgggcgcgcaccgcgactccgttcagtgttacaacacctcaggggggttcttgcatacaccgctcgatcaagtgctgaaaaatgtggtgatttcccgcgaaaatggcattggcggtattaagttgaaagtcggacaacccaactgcgctgaggatattcgccgcttaaccgcagtacgtgaagcgcttggggatgagttcccgttaatggttgacgctaaccagcagtgggatcgcgaaacggctatccgcatggggcgtaaaatggaacagttcaaccttatctggattgaagaaccattagatgcttacgacatcgaaggccatgcccagcttgctgccgcgctggatacgcctatcgccaccggggaaatgctgaccagtttccgggaacacgagcagttgattctgggcaatgccagcgatttcgttcagccagatgcgccgcgtgtcggcggtatctctccgttcctgaagattatggatctggcggcgaaacacgggcgtaagctggcgccgcactttgcgatggaagtacacctgcacctttccgcagcgtatcccctggagccgtggctggaacatttcgagtggctgaacccattattcaacgagcaacttgagctgcgcgatggccgcatgtggatttccgatcgtcatggtctgggtttcacgctcagtgaacaagcgcgccgctggacacaattaacatgtgaatttggcaaacgcccttaacccgactggcgggaatccgtcccgcctctcttaccttacaggatgcattctgcccttatctgaggagtagataatgaacacaataataaagcgcacaaaagtgcgtcataccattcttatatttttatttcttgctaccgtatttaattatgcggatcgcgcaactctatccgtagttgccccaataatgagtaaagaattaggttttgatccggaagcgatgggcctggccttctcctcatttggtattgcctatgtcattatgcaactacccggcggttggctattagaccgctacggttcacgactggtttacggttgcgcattgattggctggtcgttagtaaccatgtttcagggaacgatctatctgtatggcagcccattaattgtactggttattctacgtctgctgatgggcgcgattgaagcgcctgcctttccggcgaacagtcgtttaagcgtacaatggtttcccaataatgaaagaggcttcgttacttcagtttatcaggctgcgcaatatatctcgctgggcattatcaccccgctaatgacgatcattctgcataatttaagctggcattttgtcttctattatattggcgctattggcgtgatgctcggtatattctggttaatgaaagtcaaagatccgatgcaccatccaaaagttaatcaagcggaaattgactatattcgtagcggtggtggcgagccctctctgggctgtaaaaaggagccgcagaaaataacgttcgcgcagattaaaaccgtctgtgttaaccggatgatgatcggtgtttatatcgggcaattctgcgtcacctctatcacctggttcttcctgacctggttcccgacctatctgtaccaggcgaaaggcatgtcgattctgaaagtcggttttgtggccagtattccagccattgccggttttattggcggcctgctcggcggcgtgttctccgactggctactcaaacgcggctatagccttaccgtcgcgcggaaattgcctgttatctgcggtatgttgctctcttgcgtaattgtgatcgccaactacacctcttcagaatttgtggtcattgcggcgatgagtctggccttttttgccaaagggtttggtaacctgggctggtgcgtactcagcgacacctcgccgaaggaagttctgggtattgctggcggcgtatttaacatgtgcggcaatatggcaagcatcgttacgccactggtcatcgcgtgattcttgccaatactcagtcgttcgactttgccattttatacgttggctcgatgggacttattggtctcatttcatatctgtttatcgtcggcccgctggatcgcatcacgctgacatcatccgcagcctgattgtccacattgcgaattcttcgctccgctgttccgggattgcactccatcggaacagcgttttttagttgtaccgcgcaattcagatgccgtcgccatactcaaacgtatggtgtatcccgttgaaatgctggtccatatccatcgacggcttatcgctgcccggcttgccgacaatacgcgccggaacgcctgcggcggtagtgtgcggcgggacaggctgtaaaacgacggaacctgcgccaattttcgcgccgcgccccacctcgatattgccgagaattttcgcgcccgcgccaatcatcacgccttcgcggattttaggatgacgatcgccgctcgttttcccggtaccgcccagggtgacggattgcaagatcgacacatcatcttcaataaccgccgtctcccccaccacaataccggtggcatggtcgagcataatcccgcggccaattttcgctgccgggtgaatatccacctgaaacgagaccgaaacctgattttgcaggaagatagccagcgcgcggcgacctttattccacaaccagtgaccaatgcggtaggcctgtagcgcatgaaagcctttcagatataacagcggcgtggagtatttatccaccgccggatcgcgagtgcgcacggcctgaatatcgcaggctgccgacgcgatcatttccgggtcggcggcataggcttcttcaactacttcacggatagcgatagcgggcatgatgggcgaagccagtttatttgccagcatatagctcagcgcactgcccagattttcatgcttgagtagcgtggcgtgataaaaactggccaacataggctcacagtcagctaaagcgcgggcttcagctttaatattcttccagacgatttccagttcttcacacggcatggcttactccagacgggcagaaaacgaccaacccgttctgtgcgggttgggtcgtttatgcaaacagttccttacggctagtggcgactcagctcttccttgcgggcgcgacctaataacgttaatgctgcctcgcgcgcgttttttccgcaatacaatacttgataaatttcctcggttattggcatttcaacaccaaaacggtgcgccaattcacgaacttctttcgtattgcgatagccttcgaccacctggccaatcttatcctgcgcgcctttaacgtccatgccctggccaagcatcatgccaaaacgacggttgcgcgactggttgtcggtacaggtcagcaccagatcgcctaaacccgccatccccataaaggtggcgggatcggcaccaagcgctgcgccaagccgcgacatttcggtcagtccacgcgtgattagcgccgtgcgggcgttcgcgccgaagccgatgccgtcagacatccccgcgccaatcgcaatcacatttttcaccgcgccgccaagctgcacgccgataaaatccgcattgatatagacgcgaaaactttttccgcagtgcaacagttgctggagatcgtcggcaaaggtctcatcggttgaggccagcgagattgccgtcggcaaacccgccgccagctctttagcgaacgtcggaccggaaatcaccgccagcgggatttgatcgcctaacgcctcgcgagcgacatcctgcaacaggcgccccgtttccgcttccaggcctttggtcgcccataccagacgcgcatccggacgcatcagcggtttaatctgccgcagcacgtcgctgaaaacatggcttggcaccaccaccagaatgttacgactggccgccagcgcggttgctaagtcgctttccaggtgtaacgtatcgggaaaaggcacatcgggaaggaacgcgacgttgcagcgatcgtgctccagggtcgcgatatgttttgggtcgtggccccacaggacaacctggtggccgtttctcgccagagtgatggcaagagcggtgccgtacgagccggcaccgatgactgtcattgacgcattactttggttcatcaggcatcctgatgttcttcagtaccttcgccagcctgctgctgcaaatagttcatgaacagcgcatcaaagttgaccggcgcaaggttcagttgcgggaacgtaccgcgtgaaaccaggctggtgatgcactcgcgagcatacgggaacagaatgttcgggcagtatgcgcccaggcaatgcgccatctgagtaccttcaataccgctgatggagaaaataccggcctgctgaacttcgcacaggaacgcggtttcttcccccagggaagccgttacggtaacacgcagcacaacttcataaacgtcatccgccagttgggaagatgccgtatcaagatccagtttaacctctggctgccaatctttctggaaaacatgcggtgcgtttggcgcttcgaaagaaacatccttggtatagatacgttggatctggaaagccatttcagtgttattttgttctgacatgtgtaaaaccctttagtgttgtccttaaatacttgagtacgccttaacgcaacagcggatccagtccaccacgcgcatccagcgcatacaagtcgtcacaaccgccaatgtgctgtgcatcaataaaaatttgcggaaccgtcgttcggccactacgtttgatcatctcttcacgcttcacggcgtcgccgtcaatcgcaatttcctggaaactcacgcccttgctgtttaacagcgcctttgcacgatggcaaaacgggcaggttgctttggtgtagatttcaatattggccatgacttcgctcctgtttttttacccgatggatttcatgtcgacgcaagggcaagtcattccccttgcgtcatgaaaacgacgggtaatcacttaccgcgcaccagaggcagattctcgccgctccagcctgctacgccttctttcaacacaaagaccttttcaaagccggcttttgtcagcgcgttagcggattcctggcactgcataccagaaccgtcgaccacgataatcggcttgtctttgtgcttttccagttcgccaacattgttggctttgatttcgctcggcagcaaattggtcgcgccagcgatatggcctttacggaaatcgtcacgttgacgtaaatccacaacaacggcgtcctctttgttgataaggcgcgtggcttcgccgcgtgtaatcaccttaacttttgaagtcagacctttgaacgtggtaaataaaaccgccaccagtaacgcaatccaggcgatactcagtatgggatgacggccaacaaattgcataatttcttgcatggggggtaacaactcccgacgtagtgattaaaaaaccaggaaaggagtatacctgtgcagtggcgcaaatacagccagagcgtgcactggaatgcatttttgcggggcgctacgaaaaaaaatcacgctattacttgccttctcacgccagcgcgatccctttctttgatcttctgaggctattttatcgattcagctgtagtaaaattacgcaattattttgtctattgagtatgaggttgtcgcaatgtcggtttctaaaaaacctatggtactggtgattctggatggctacggctaccgtgaagaacagcaggataacgctatcttaaacgccaaaaccccggtgatggatgctctgtgggcaaaacgtccgcataccctgatcgacgcatccggtctggaagtgggtctgcctgaccgccagatgggcaactccgaagtgggccacgttaacctgggcgcaggccgcatcgtttatcaggacctgacgcgtctggacgttgaaattaaagaacgtactttctttgctaacccagtcctgaccaatgcggtagaccaggcgaaaaacgccggtaaagcggttcatattatgggtctgctgtccgcgggcggcgtccacagccacgaagatcacattatggcgatggtggagctggccgcagagcgcggcgcagaaaaaatctatctgcacgccttcctcgacggtcgcgacacgccgccgcgcagcgctgaagcctcgctgaaaaaattcgaagacaaattcgccgcgctgggcaaaggccgcgtggcgtctatcgtcggtcgttactacgctatggaccgcgacaaccgttgggatcgcgtggaaaaagcgtatgatctgatgaccctggcgcagggcgaattccaggcagataccgctgtggctggcctgcaggccgcttacgctcgtgatgaaaacgatgagtttgtcaaagcgaccgttatccgcgccgagggccaggctgatgcggcgatggaagacggcgacacgctgattttcatgaacttccgcgctgaccgcgcgcgcgaaattacccgcgctttcgttaatgctgatttcgacggctttgcgcgtaagaaagtggttaatctgaacttcgtgatgctgaccgaatacgccgccgacatcaaaactgccgttgcctacccaccagcgtcgctggcgaatacctttggcgaatggatggcgaaaaacgacaaaactcagctgcgtatttccgaaacggaaaaatatgcgcacgtaacctttttctttaacggcggcgtagaagaaccgtttgctggtgaagagcgcattctgatcaactccccgaaagtggccacttatgacctgcaaccggaaatgagctctgcagaattgactgaaaaattggtcgcggcgatcgaaagcggtaagtacgacaccatcatttgtaactatccaaacggcgatatggtcggtcataccggcgtgatggaagccgccatcaaagcggtggaagcgctggataactgcattgaacaggtaacaaaagcggttgagtccgttggtggacaactgttgattaccgcggaccacggcaacgcggagcagatgcgcgatccggcgaccggtcaggcgcataccgcccacaccaacctgccggtgccgctgatttatgtcggcgagaaaaacgtgaaggcggtcgaaggcggcaaactttcagacattgcgcctaccatgctgtcgctgatggggatggaaatcccgcaagagatgactggtaagccgctgttcatcgtggaataatccctccccatgaggggaaaggcgattaacaccattcaacaggccgtgaaaccaagaacgttttcagtcaggcctttgttctacgccagcgtacttagcgctggcgtattgttgtgcgccttttccgcccacgcggatgaccgtgatcaactcaaatctattcaggccgatatcgccgcgaaagaacgcgacgtacgccagcagcagcaacaacgcgccagcctcctggcacaacttaaagcccaggaagaggccatctcagccgcagcacgtaagctgcgcgaaacgcaaagcaccctggatcagttaaacgcgcaaattgatgagatgaacgcctcaattgccaaactggagcagcaaaaagccagccaggagcgtaatcttgccgcgcagttggacgccgctttccgccagggcgaacacaccggcattcagcttattcttagcggagaagaaagccagcgtgggcaacgcctgcaggcctacttcggctatctgaaccaggcgcgccaggagactatcgccgagctgaaacagactcgcgaacaggtcgccacgcaaaaagccgagctggaagagaagcaaagccaacaacaaacgttgctgtatgagcagcgcgcccagcaggcgaagctggaacaggcgcgtaatgaacgtaagaaaacgcttgccggactggagtcgtctattcagcaaggccagcaacagttaagcgaactacgcgccaacgaatcacgcctacgcaacagtatcgcgcgggcggaagcggcggccaaagcgcgagcggagcgtgaagcccgcgaagcgcaggcggtacgcgataagcagcaggaagcctcgcgtaaaggcagcacctataagccgacggaaagcgagcgctcgctaatgtcccgcaccggcggtctgggcgcgcctcgcggtcaggcatactggccggtacgcggcccgatcttgcatcgctatggcgaacggctgcagggtgagctacgttggaaggggatggtgatcggcgcgtcggaaggcaccgaggtcaaagccatcgccgacggcagggtgattctggcggactggctacaaggctatggcctggtggtggtcgtagagcatggtaaaggcgatatgagcctttacggctataaccagagcgcgctggtcagcgtaggcgcgcaggtgcgcgccggacaacctatcgcccttgtgggcagtagcggcggtcagggcagaccctcgctttatttcgaaattcgtcgccagggtcaggccgtcaatccacagccgtggttgggaagataagttttgcctcagtttcgtcgctccattctcacgctggccactttgctggcgtttgcacatcccgttttcgctggcaagctcgccatcgtgattgatgattttggctatcgcccgcacacggaaaaccaggttctggcgctgccgccaaacatctccgtcgctgtactgcccaacgcgccgcacgcgcgcgaaatggcaactaaagcgcacaatagcgggcatgaggtgttaatccatctgccgatggcgccgctaagcaaacagccgctggagaaggatacgctgcgaccagatatgagcagcgatgagatcgagcgcattatccgcgaggcggtaaacaacgtgccgtatgccgtcgggcttaataaccacatgggcagcgcaatgacttccagcctgttcggtatgcaaaaagttatgcaggcgctggaacattacaatctctattttctcgacagcatgacgattggcaatagccaggcgatgcgcgcggcatccggtacgggtgtgaaagtgatcaagcgcaaagtgttcctcgacgatacgcaaaacgaggcggatatccgtcgtcagtttaatcgcgctatcgaactggcccgtcgcaacggttccgctatcgcgattggtcatccacatcccgcaacggttcgcgtgctgcaacagatggtttatcgcctgccggcggatatcaccctggtacgtccaggcagcctgctcaacgaaccgcaggtagatacgtcccgacctggtgtgacgccgcagaaaattgacgcgccgcgcaatcccttccgcggcgtaaagatgtgcaagccgaaaaaaccgctgcaaccggtctacgctacgcgctttttcagcgtcatcggcgagagcattacgcaaagttccgtggttacctggtttcagcaccagtggcaaggctgggggaaaatcgccgcgcctaaaaacgtgagcgctaagacagattgagcgccttacgggccatacgacggtgcgacaaggttttgtcgcgccattgccacagccggaaggaccagagcagcgtctgataagctgctttcgcgctgcggacgttagccatcatccgtctatacatgccagaagtaaaaatttcggcaatcatacgctggcgggtcaaaatatcaggctctttacgtaccgcatgacaaacgcgtaacgcttcccaggtaatttgctggcgaaattccgggtaaatcggaatacgacgggcataatcacgattgagcttttctaataatcgcgtaattttaatataatgccgctgataattaagatttttattgccttgtctttgcaaacggcttaccgaattatcatgcaggaaatatttatataatgattgttcggtataacgtacgcgcgtggcattaaacataacttccgtcgaccataatatgtcctgatgatgtagtccgggaacgaaagtaatattgttatcggtaattaacgcacgtcgataaacgcccatccagacaacatgcgtccagcgccgcgaggccaacgccatacgcaaccaatccggtccgcttaataccccggtggaacgcagacgatcggtcggaatagattgccaggcgtgcccggtttttcggacgcaccagtccgcattacactgcgcaacgtccagatcatcgttaagcgccatagtcatcagcgtttcatacatcttcgggtagacctggtcatccgcatcgacaaaggcgacataatcgccggtcgccgcttgcaggccaagattacgggcgacagatgcgccagcattggcctgatgaagcagtcgaacatgtgggtaatgttccgcgtaatgttttgctatctcaacggaatgatccgtcgatccatcattcacaataataatttccagcgccgaccacgtttgcgcgattaacgacgccatgcaagcattaaaatccgctcccgcattatataacgggacaatgatactcactttggttttactatttttcataacgattaccagaaaaaccttaatttaccctgcctttatactgtggctctattaagaaactattaagccgccataattaatttttacagtaaaaagcaagcacaaaactcagagtagagcgtgacgttagcgagtaaaataagagtaaagcgcaattacgaatgcttgatgtctatgacaattctttacggctttccagattttccctaacaaaaaaggttggcgaatgacaccaaccttttacgatgaaacgtatatcagacccgataaaattatcgggtctctatacccttcatacttcaagttgcttatgtgttggctacggattactcggcccatccatgggcctcgccctgacgggccgtcgcaagcgacgttcaaatctgctcccggcagatttgtcgttcaccccagtcatatagttatctatgctcctggggactcactcccttgccgcctttaagcaactcgaattattttgggtatatacatattaatcccagctcagaataacttttcctgactggcctgaacgcatggcatcaaaacctttctggaaatcatcaatagagaaacgatgggtgataatcggtgacagatccagaccggactggatcagcgccgccattttgtaccacgtttcgaacatctcacgaccataaatacctttaatgaacaagcccttaaagataacttttgtccagtcgatagacatatctgatggcggaatccccagcatcgcaatacgaccgccgtgattcatggtgtccagcatggtacgaaacgccggcggcgcgccggacatctccagacccacatcgaacccttcggtcattcccagctccgccataacgtcgttcaggctctctttcgcgacgttgaccgcgcgggtgacgcccattttacgcgccagctccagacggtattcattgacgtcagtaatcaccacatgacgcgcgccgacatgtttcgccaccgcggcggccattacgccgattggccccgcccccgataccagtacatcttcgccgaccagatcgaaagacagcgccgtatgcaccgcattaccaaacgggtcgaaaatagaggctaaatcatcagaaatgttatccgggattttaaacgcattgaacgccgggatgaccaggtattccgcaaagcagccgggacggttgacgcccacgccggtggtgttgcgacacaggtgagtgcgaccgccgcggcagttgcggcaatgaccgcaggtgatgtgaccttcgccggagacgcgatcgccgattttaaagcctttcacttcctgaccgatgccgaccacttcgccgacatattcatgccccacgaccatcggaaccgggatggttttttgcgaccagtcatcccagttatagatgtgaacgtcagtaccgcagatggctgttttacggattttaatcagcaaatcgttatggccgacttccggttccggaacgtcggtcatccagatgccctcttccgctttcagtttggataacgctttcatcttacatcctcaggcaatcacgcccagttgtttaccaatacgcgtgaacgcgtctaccgcacgcgtaatttgctcaggcgtatgcgccgcagacatctgggtacgaatacgcgcctgaccttttggtacgaccggatagaagaaaccggtaacgtaaatgccctctttttgcagttcgcgggcaaatttctgcgcgacaaccgcatctcccagcattaccgggatgatggcgtgatccgcgcctgccagcgtaaatcccgcggcagacatctgctcacggaactgccgggcgttcgcccacaagcgatcgcgcagttctgcgcccgcttccaccatctccaacactttaatagaagccgccacgattgccggcgccagggagttggagaacagatatgggcgggaacgctgacgcaaccactcaacgacctctttacgcgccgcggtataaccgccggatgcgccgcctaacgctttgcccagcgtaccggtaataatatctacgcggcccattacgtcgcagtattcatgggaaccgcgaccgttttcgccgacaaagcctaccgcgtgagaatcatcaaccatcaccagcgcatcgtatttatcggccagatcacagacgcctttcagattggcgatgacgccatccattgagaacaccccatcggtggcgatcaggacatgacgcgcgccggcctcacgcgcctctttcagccgcgcttccagctctgccatatcgttgttggcatagcgatagcgcttcgctttacacaaacgcacgccgtcaatgatagacgcgtggttcagcgcgtcggaaataatagcgtcttccgcgcccagcaacgtctcaaacaagccgccgttagcgtcgaaacaggaggaatacagaatcgcatcttccatgccgaggaagcttgccagcttttgttccagcgctttgtggctgtcctgggtgccgcagataaaacgcacggacgccataccgaaaccgtggctgtccatgcccgcttttgcggcattaatcagctcagggtgattagccagcccgagatagttattggcgcaaaagttaataacgtggcttccatccgccacggtgatatccgcctgctgcgcagacgtaataatgcgctcttctttaaacaatccttccgcccgggcggtttccagatcgttggttaactgtttgtaaaaatccccacgcattgcgattctccagactgggcaaatttcagcacatattacccaaagcgatacgttgatacgagatgacgcgtcatcacttctttaaaatgcagcataaatcacgcgtatcctcacgggttatcagtgaatggatgaatagtgttatgataagagcattcatgtctgagacagtctctgacaccataattcaaaggttacagttatgatcatcgttaccggcggcgcgggctttatcggcagcaatatcgttaaggccctgaatgataaaggtatcaccgatattctggtggtggataacctgaaagacggcaccaagtttgtaaacctggtggatctgaacattgctgactatatggataaggaagatttcctgatccagattatgtccggagaagagctcggcgatatcgaagctattttccatgaaggcgcctgctcttccaccaccgagtgggacggcaagtatatgatggataataactatcaatactccaaagagctgctgcactattgtcttgagcgcgaaatcccgttcctctacgcctcttctgccgccacctatggcggtcgcacgtctgatttcatcgaatcgcgcgaatacgaaaaaccgcttaacgtttatggctattctaaattcctgtttgatgaatatgtgcgccagatcctgccagaagcgaactcgcagattgtcggtttccgctatttcaacgtctatggaccacgtgaaggccataaaggcagcatggcaagcgtggcatttcatctgaatacacagttaaacaacggcgaaagcccgaaactgtttgaaggcagcgaaaacttcaagcgcgacttcgtttacgtgggcgatgtggccgccgttaacctgtggttcctggaaagcggcaagtccggcatctttaacctgggcacaggccgtgcggaatctttccaggccgtcgccgacgcgacgctggcataccataaaaaaggtagcattgaatacattccgttcccggataagctgaaaggtcgctatcaggcgtttacgcaggcggatttaaccaatctgcgcaacgcgggctacgacaaaccctttaagaccgtcgccgaaggcgtcacggagtatatggcctggctgaaccgcgacgcgtaagtatgaaaattttggtcattggcccgtcctgggtgggcgacatgatgatgtcgcaaagtctctatcgcacgcttaaagcacgctatccccaggcgataatcgacgtgatggcgccagcctggtgtcgtccgttattatcgcgtatgccggaagttaacgaggcgatacccatgccgttgggccacggcgcgctggaaatcggcgagcgccgcagattgggccatagcctgcgagagaagcgctacgatcgcgcctgggtgttgccaaattcgtttaaatcggcgctgattcctttctttgccaatatcccgcaccgtaccggctggcgcggcgaaatgcgctatggcctgctgaacgatgcgcgcgtccttgataaagacgcctggccactgatggtggagcgctacgtggcgctggcttatgacaagggcgtgatgcgcacggcgaaagatctgccccagccgctactctggccacagctccaggttagcgagggtgaaaagtcgctgatgtgcagcgacttttcactatcttctgaacgtcctctgatcggcttttgccccggcgcagaatttggcccggcaaaacgttggccgcactatcactacgccgaactggcaaagcagctcattaacgaagggtatcaggtcgtgctgtttggctcggcaaaagaccatgaagccggaaatgagatcctggcggcgctgaatagcgagcagcaggcatggtgtcgcaacctggcgggggaaacccagctggaacaggccgtcattctgatagccgcctgtaaagccatcgtcactaacgattccgggctgatgcacgtcgcggcggcgctcgaccgcccgctggtcgccttgtatggtccaagtagcccggatttcacgccgccgctgtctcataaggcccgggtgattcgtctcattacgggttatcacaaagtgcgtaaaggtgatacggcgcaaggctatcaccagagcctgatcgatatcacgccgcagcgggttctggaagagcttcattcgctgttgtcggaagagggcgtttaatgcgggttttgatcgttaaaacatcatcgatgggcgacgtattacataccctgcctgcgcttaccgacgcgcaacaggcgattccggggattcaatttgattgggctgtcgaagaagggtttgcacaaattccgtcctggcacagtgctgtcgatcgcgtgattcccgtcgctattcgccgttggcgcaaggcctggttttccgcgcccatcaaagcggaacgcacagcctttcgtcgggcggtatgcgcaaaccaatacgacgctgtgattgatgcgcaggggctggtaaaaagcgcggcgctggtgacgcgtctggcgcatgggataaagcacggtatggactggagtaccgcccgcgaaccgctggccagcctgttctataaccgtaaacaccatatcgcaaagcaacaacatgcggttgaacggacgcgcgagctgttcgccaaaagcctgggatacgataaaccgcagtcgcagggcgattatgccatcgcaaaacattttctgcattgccagcaggcggttagcgatccgtatgcggtgtttttacatgccacgacccgcgatgataaacactggccggaagcaaactggcgcgagcttatcggcctggtgggcaacaccggattacggataaagcttccctggggcgcgcctcatgaggaggcccgggctaaacgactggccgaaggctttgactatgtggatgtgttaccgcgcatgagcctggaggaggtcgccagagtgctggctggcgcaaaatttgtcgtatcggttgataccggcctgagccatctcaccgccgcgctcgacagaccgaatattacgctatatggcccaacggaccctgggttaattggaggttatgggaagaaccaaatggcatgctgctcaccagaacagaacctggcgaatttagatgccacaagcgtatttggaaagattcattaaagagactctgtctcatcccaaacctattgtggagaaaagatgctaaccacatcattaacgttaaataaagagaaatggaagccgatctggaataaagcgctggtttttctttttgttgccacgtattttctggatggtattacgcgttataaacatttgataatcatacttatggttatcaccgcgatttatcaggtctcacgctcaccgaaaagtttcccccctcttttcaaaaatagcgtattttatagcgtagcagtattatcattaatccttgtttattccatactcatatcgccagatatgaaagaaagtttcaaggaatttgaaaatacggtactggagggcttcttattatatactttattaattcccgtactattaaaagatgaaacaaaagaaacggttgcgaaaatagtacttttctcctttttaacaagtttaggacttcgctgccttgcagagagtattctgtatatcgaggactataataaagggattatgccattcataagctatgcgcatcgacatatgtccgattccatggttttcttatttccagcattattgaatatttggctgtttagaaaaaatgcaattaagttggtttttttggtgcttagcgccatctaccttttctttatcctgggaaccctatcgcgaggggcatggttggcggtgcttatagtaggtgttctgtgggcaatactgaaccgccaatggaagttaataggagttggtgccattttattagccattatcggcgctttggttatcactcaacataataacaaaccagacccagaacatttactgtataaattacagcagacagatagctcatatcgttatactaacggaacccagggcaccgcgtggatactgattcaggaaaacccgatcaagggctacggctatggtaatgatgtgtatgatggtgtttataataaacgcgttgtcgattatccaacgtggacctttaaagaatctatcggtccgcataataccattctgtacatctggtttagtgcaggcatattgggtctggcgagcctggtctatttatatggcgctatcatcagggaaacagccagctctaccctcaggaaagtagagataagcccctacaatgctcatctcttgctatttttatctttcgtcggtttttatatcgttcgtggcaattttgaacaggtcgatattgctcaaattggtatcattaccggttttctgctggcgctaagaaatagataaaaaaacgcgctgatacttattacggtatcagcgcgttttccatcatcaggactcaatcacttatcaaaccagtttttcatttgttcctcgaaacgctgcgctacattttcccaactgtattttgaaaacaccagggattttgctttttcggcaatctggtggcgttccttatcagcaagcgcacggttaatatcattaattatactgtcgctcgacataggttctgcgaggtgatagcccgttatgccatctaacacaaattcgctaatccccccttttttgctggcaagaaccgcttttcctgctgccatcgcttctacagccaccatgcaaaatgcttcttcaacctgagatggcacaataaccagatcggctatatgatagaagttatgcatctggtcaggagattgccccccagccataatacaatccgttccaatctcttttgcggcgtccagtactttcttttgatactctgctttttcacccttgcggcttgcataagggtcgccaacaacgacaagtttaatattacttcttaaggtacgtaattgtttgaacgcctgcaaaagcaacaggatgcctttatcaggcgaaattctcccggcatacaagagaacggtggcatcttccgcaatatttaattgctgacgaagattatcttgtgggtttcttttataagtctcagcacaaaaaccattaggcacaatactaacagcagcggcgggcaatctttcttcataaaacgctttaagaaactgactgggcacgataatttttgcatcattatcaggaagttctggttcaaatgcattatgcatgtgcataaccagttttgcattcggattgcgctctctgatctgccgatacagtttcatactattatgaataacaatgacgctatcttcctgggtagtcactttatctctaatattaaggatgcgctgggaatagggtagtgggtcgagacgagtccatttctgaaaaagacgcttataaactttactaaacccgatgtaatgaatatcacagttatcgtttattttattatattcaggatagccagcattctttatacaagcaatagcattcggtattgatagtcgttttgcaacctggtaaatccaggtttctaccgcagccgcaccacgaggaggaattgaaaatataggagtaacagtaaatatgatttttttaatcataatagctataatccagaatagttaactttatagaaaaagaaatgttataaaaaaaagaaatgcgtgccgaagcaacgaaaaataatgatttatctagtgtctagacaattttatcgtaatatatttcatcctcaagctccgaggctgtaatatatggaataatatcgtaatgaattgcagtatcatctgataaattaaagatatttaaatcactcacattttttctcataaaagtaaaaaatggcagtattttaaacagatctttactaagctcagatggcatagggctggtagattcgtcatagaaacgtgggcaactccctgttaagtcaagcccagaacatataatacggccatacttgagggaataggcaacctgaatagcggtataagcaatagtatggcaagagcaatacccgatgctgatatccttgcaaaatccagccagtcgccctcttttcgaaagaggaactgaaataagtaatgctttatgaacccgcttgaggatattaaatttaattttctttaaaaagccccctttttctcggcgataaaaggagcgaataattaaacagttttcttcaatatatttttgatcatccactgaagcctgttcgtacacatcaagattgacgatagtaaactgactgttacggctaaagttataaaaatcttcgcgccgacgatggaggaagcgaatatccgtcagaaggtacaaaaatggcttgacgttattgtttagcaaatattgaacagaaccattgactgcaatgacatctttcattcgtaacaaggacagcggcgtctttctggacgtaggaccagaaagaaaaataatacaatcttcagccgttcttttcgcaataagttgcagaacatcggcgtgagttatgaagttaacgctgcccataaaaaactcgtatgtttatcatgcaacctataaataaatgttatattcaataactaatattacatctcaaattctctcaagtatgtcataacgctgcagcaaataaaagtcagtcagccccttaaattaaaccaaacgtgctacattgatcagcgtttttccttacccttaatacgacgcaagaaatttcggagttttttcttataaatcaataagtaaaatccgatatctctcacattatttttgataccataatgtctttctaaatcaatacgatcctttgcttttcgttgtctggaaggtctttttccggacaaatcgataattctgatctcattgccttgcaggataaagttacctttatggggatcgcccgaaaccataccatgctgatgcagagaatatatcgactgtttgattttccctctcacctcgtcagaaatttctggcatatcaacaagttcaataccttcaatatactcaattatcatcacgtatgtttttacatagcgtaatgttttaatttccgccagcaggtaaaaatcattaagcgccgcaaacccttcacgccgcacacgatctgtctgatgaaaaagcttttcgtagtaatctccttttactaacgatttgaaaaagcgttcagtattttttacttttggactaaatactttgagaatatattttccgtagtctgtattaatcaatacaacttttgtatcttctatattacggaagactttaataacctgatgattataagatagaaaatctttgaatatctcaatgtatttttcaccgtcttttttgacaaagacggtatagtttttaatctttttttcaataatcataatggagatttagggaggggaattatttgtggaaaagtttacgataaagatatgcgcttccagccagaaggcctttaaaataatgaccttgcacgagaagatgtttatatcgcttcttaaattcgactatggtacgcgcatcttttgcgggaaaatctttccagggcgagttcagtcgtgcatttttataatagataactgaaggataatttgcccaggcatgccatggttttgtagcgcccgtataatgaattaaaatagtattatcattaattatattgctatattttttatgtgacttatctttcaactcacttttaatagtataaatagtattatacggtcgcggtagaaaaatgactttatcctgtaggagaatattcaaaacatcctgatcgggatatttaaaagagtcagcctctttacctgccaaaagtaaaaatgcctttttggttaaggcattctctttccataatttcaggttaacaaaaaccacgccggagttaaaataaccaccttgtaaattaaaagcgcttaatctctcatttaccttattctggatggaatcaacatcttttacgaccgcagcgatcttctctgtcagatcaagctgtaaaagatcttgcaaagatcctttgcatacaacatcggcatccaaataaagtaaggtatttaccttcttgctgagataatcgaaagcaaataaacgaaaatacattgctctcgaccatactttagtttgaggcaatacctcaaggctttctactttaataagataaagagaaatttttatgtgatgctgtacggctaaacgctctatatattttacaaaacacggggagtatgagtcacaaataatgtgaaaagcgagcgggatattattgtttaatacaactgaagcgattgatacccccacaccatcaagatagttttcatcaacgccataagaaatgtttaatacgttatcatcattattattactttcatcaaaaactttatattcagctatttctatctcaggaaatgaatccattacatcacctatgggttttattcaagaagtttacgtttaaagtaggctatataataatttatacccgaagtataatgcttctgattaaacatatgctttgccgcataacgtaactgatggctagtcactggatttaaaagtgcacaatgagaccatggtgagttgctcttagcctgtaaaaaatattgtgacacggggtaagccccccaactatgccagggcttcgttggtccgatataatgaacaaatacagtctcagcatcaactggattaataactgaatcttttaattcatagttaagactaaattgtgtattaaattttttatcaacaaaacgcgctttattcactaaaaatatatttaatacatcctgatcaaggtgcgttatgcgctgtactacctctggatcttttagcatttcaatcgctttcttagagatattttctgcagtccaaagaggtatgttaattaaaataaaaccggcattaaaatagccagaaaccagcccaggcgttgccaggctaaccgagcgcttagtccaccattccaactcgccttcagcaacgacagccgcaatctcattttcagcaaaattaagatcaataagttcctgaatactccccttacatgcaatatctgcatccagataaagtactctatctgttttatctgaaaaataatcggcgataatgaatctaaagtatgttgcataggtccagtttttggtactgggtagcgattttaagcgctcacagtcgattaggtaaacaacaatctgcgtagcgtactgttttgctaatgcctcaaatcgctgctggtcttcagagtcaaagaaatcggtaaaaacatggaaagctaacgccttctctggattagcgaggagaaccgatgcaatagagacaccacagccaaaaagaaagtttttatcaatcccataagctatattaaatttatcagcatcactatgttgtgcatagttataatctaaagtctgttgaatgacttcttcttcaaaatattttctgctcatagtgatcacttttgtaatttcgagaatattgcattattaaaatttttaaaatatagcacatcgtaaaatctctcaatcgtgccgggaataatatcatgctgatattttacttcaccagaaataacgcgattaaggtgtcctacaaaatcatctatagcacccggagtgtaaagctcaccattcaaaccgggtttaatcatatcgcgcggaccagacatacaatcagaactaatacacggaattccatatgacattgcttccagcagggtcataggaaatccctcaaatgcagaggtaagtagtaacgcggtgacattttttattttttgctgtacgacttgccacggcgcgctttgccaaccataccagatcacacgctgctcaataccaagctcccgactataggcctggcacttttcaaaatctgagccatcaccaataatatgtagctgccattcccctgtcgtacgagctaagccatcaaataaatctttaactcttttctgcccttcaaatttaagacgccctacatagagaaatacagctggtttatcgcgctcaggcggcggcacaatgactgttttaatagagacaggattataaacgacgctaatatcttgcgctgagataccccgtgccatgatctgttctttaataccactactgatggccagatgataatccgcgtacgttatacattctgcatgttttttatggtcgagcgaaaaatgcggccacgagaaaatagtaaaatgtttaccacttttctttcgtgctttattggcataaagacatgagatgacatcaatacatatcacaatatccggtgacgtttctttcagccactgactaaaattataaacatgcttagctcgacgaagaaaacttaattttatatttgagaatgattgcgcatatttaatctcttttagccatgctttatccattttgtcattacgacaaaagaaaaacatttcacagttgatcttcggagagctattttcaaacgtatggataacgttgctaataacggtttccatccctccaaaaccggataccgcttcgccaataaaagctattttcatatataccccagagttaaaaccttaatctaaagactttagatattaaatagcaaaaatagtaatataaccctatagagtaatttttacctgacatctctctttttgctttaaggcgtagtcaatatctttattattttcgataatggaatatattgccacacctgctggcattataaaaccatgatcaaagcaaagagcaatgtccagtcttcttccaaaaaaatcatcatgttgaattatgtttttttggtttgaaatataacttttaatgttagacattctgtctatccttgtctcactcataaattactcactgagtgcataattattataattacagattttttcttattgtcctttctttaattcgagcggctttaacatctgcctgatgaatcaaccccgattctttttgcaaaatctctcgcagggggagagagaaatactcacgcataaaccggaatatatctcgctgagtcaggccaatattcattgaagaaaaataaagcccaattaaatctttgtcacgccagcgaaggggaacgtgctggcgtatctgcgcgcgatgcaggtcaattacggagatttttaaatcctcttcgcgaccagtgaaaggtaaatgcagaagaaagtggcaaatataacagtcgcgatggttaattcccccggcgtgcattttacgtaccatagtcgcaacacgcttaatgatcatccacttcacctgcgcgtccggtggattaacagcccagtcagcacagtagtcttcaaggctaatggtgggcgttaaatcttcggtgataataaatgatgttctggttagcgggtttacgcctttttcaccaaaaccaacgccgtgcatcgtatcaacgcccagctcatgtagacgatgaatggcgtgccattctctgtcagcgcccagaacaggcatacgtaacgaaatcaggttcttcacaatttctttcagcgaagtacctttatgccacttcaggaagtagcttttaccgtccagctcaaaccgcaatgttcgacgcgtctccagctctctgaacacttcgccctgtaacgtttttacttcctcaaaagcatctttaccgcgccatagtgtggttaacggcgctttcagctcaaccatctaaatcacctgtaataatatccgcggccttctccggtaagctgtataaatcctgggtatcagcataataccgcgcattttcagcccaggcgttgcgtaaggaaggctgtgtcagcgctttgagtaaaacctcatttagcgcatcctggcggaatggttcagtcatcgcttcgccacagtttgcatccacaatataatgtgcataaccgcacaccgcggttgtcagcaccggcaaaccagcagtaatggcttccagcaaaacaataccagcagcttcctgataggctggatgcagtaaaaggtcggctgccgccattaactccgcgatatcattacgtccggagaaaaaatgcacattcgtgccgacgccgcttctttcagccagtgctgcaaacttcttcggcttatcctgcccgacaacatagagcaccgtattttgccgtaaagattcgggtagcgatgccagcgcttcaatagagcgatccacacctttacgggtaaagtcagaccctacttgcaacagtaatttttgctgttctgagataccatttttctgacgataaatttgacgactgtttgggatctgttggctatattttctgtccgggtaaatccccggaggaagaatatggaaacgctccgcttcagtctgataatgtttttggaagtcagcaatctgcttattcgtcagcattaatagttgcgtcggcttgccgtgttcaaacgtggcgcgttcaaaagcagcataatgccgatagcgtgatgtcaggcgatagaaaaatcctttttcctgtgcgactttttcggcgtaacacacgtctgcggcgtaatacacatcaaggcccggcatcttattgaatccaaccacccgatcgacagggtggtcgcgcaaatggtgttgcacccaggcataatattctgcgttacgaccgtggttcgtccgggatttaaccggcacgcggattaattcaaagttatccgggcattccccttcccatgactgagtataaacacgaacctgatgccctcgcgccgccacggtttgggcaatgcgcataaaatcacgctgcagaccgccaaaaggaaaatatttatataagcaaaaggcaactctcatagcaggctgtccaaatctatggtgcgtgcctcatgcggcagcattttttccgtcgcggcgataacatcttcagccggaataacggaaaggtattttttattacgatcaagctcatgccgttcaggcatcggctgataatttcctgcccaaaactgaatgatgtcgtcggtccagggacgccagaatacatgatccgtcgcgccaaaaagacaaatgaccggcgttttgactgctgcggcaatatgaccgggggccgaatcaacgccgataaagagatccgcatggtcaatcaacgcacccaattcaggaaagcgagttttacccgccagaccagtaaccggttttgtctcacagccgcgtgcaatagcatccacgcaggccatctcgtctgcggccgggcctgacgtcagtacaacttgataaccgcggcgctgcacggcatcaataacctgcgagaatttatcattatcccagcacttaaatagctgccgtgccgtaggctgaataacaacatattgtcgggtcacaccaagttgtttgagctgttgtcgcatgttttcccaatgttccgggcgatagctcatggtggtttccgtgacatactgttttagcgctaacggctttagcgcggataatgtgcgctcaacagcatgttctcccgcataaggtactaaatgcgtaaagctctttttccatagagcagactgacgattaccgaaatcctgcgagatttttatttttgcgtttaaaaaacgcacaataagcgccacgctccactgatcggtgagattgacgaccagatcatacgagttagcacgcaattttttgattagcgatagcgcgtttttgatcttctcttttgttcctgcgcctttgttactgatgccgtagagtgcattaatctccggattttccgacaatatcggtatggtgttctggtaaagaagcacatcgatttttgcatcgggataattctgcttcagcgtgctgatgacaggggtggtaagtaacatgtctccatgaaaacgcatttttataatcagaattcttcgaaatggcttttccacaagcgactctttggttgaaattgtccggataaataagcagaaaaaagcacgctaccgccccaggcttcacagcaacccgatggctaataccgcactcattttagatgcgctagtgtaacacttctttcgcagcaatccgatacgaataatttttatacacaatcatttttttaatcataaattcaaagagataataatttatccccctcttgtgaatggtcattcccattgtctggggcgacaagggcggcaaatttcaatggattgcgtaaaaatgcaaaaataatggggttcagcgcctggaatcctcgcttctgagccaatttggcgcaaaaatgggaaaagtaatggtaaagcccaggctaaatacatagaatccccagcacatccataagtcagctatttactatgctcgaattgctttacaccgctcttctctaccttattcagcctctgatctggatacggctttgggtgcgtggacgtaaagcgccggcctatcgtaagcgctggggtgaacgctacggattctaccgccgtccgttgaaaccgggcggaatcatgctgcattccgtctcggtgggcgaaactctggcggccatcccattggtccgcgctctacgtcatcgctatcccgatctgcctattaccgtaacgaccatgacgccgaccggctcggagcgcgtccagtccgcctttggcaacgatgttcagcacgtttacttgccttatgatttgcccgatgcgctcaatcgtttcctcaataagattgatcctaagctggtattgatcatggagactgagctctggccaaatctgattgctgcgctgcacaaacgtcatattcccctggttatcgctaatgcgcggctttccgcccgctccgccgcgggttatgcgaagcttggcaagtttgtccgtacgctcttgcgccgtatcaccctgattgccgcgcaaaacgaagaagatggcgaacgctttgtggcattgggcgcgaagaacaatcaggtcacggtcaccggcagtctgaaatttgatatttcagttacgccgcagctggcggctaaagccgttacgctacgccgccagtgggcgccgcaccgtccggtctggattgccaccagcacccacgatggcgaagagagtatcgttatcgccgctcaccaggcgttattacatcaattcccgaatttattactgattctggtgccccgccatccggagcgtttcccggatgctatcaatcttgtgcgtcaggcagggttaagctacatcactcgttcttcgggcgaagtaccgtccgccagcacccaggtcgtggtaggcgataccatgggcgaattaatgttgctctatggcattgccgatctcgcctttgttggtggttcgctggttgaacgcggcggtcataacccgctggaggccgccgctcatgcgattccggtactgatgggtccgcatacctttaactttaaagatatttgcgcccgtctggatcaggcgagcggacttatcacgattaccgatgcggctacgctggcaaaagaagtttcctctttactgaccgacgctgattatcgtaatttctacggacgtcacgcagttgaagtgctgtatcaaaatcagggcgcgctccagcgtctgctgcaactgctggaaccttatctgccaccgaaaacgcattgaggactgtcatgcaaaaacgggcgatttatccaggtacgtttgatccgattactaacggtcatctcgatattgtgacgcgcgcaacgcagatgttcgaccatgtcattctggctatcgccgccagccccagcaagaaacccatgttcaccctggacgaacgtgtggcgctggcgcaaaaagcgaccgcacacctgggtaacgtagaggtggtaggctttagcgacctgatggccaatttcgcccgcgacagacaggcgaatatcctgattcgtggtctgcgcgcggtggcggattttgaatatgaaatgcagttggcgcatatgaatcgccatctgatgccgcaactggaaagcgttttcctgatgccgtccaaagagtggtcgtttatttcatcgtcgctggtcaaagaagtggcgcgccatcagggcgatgtgacccactttctgccggacaatgtgcatcaggcgctaatggataagttgaaataagtttcctaccttgccgggcctggcattttacttctgacagtgacggcaatagaacgtcgcgcgctgtgcgtgtttcgttgcgactatcggcgtaccgcatacccgacacggctcgcctttgcgcccgtacacctgcaactcctgggcaaaatagcccggcttcccatcgctttgcagaaaatccttcagcgttgtcccgccttgttcaatagagcgcagcaaaacggctttaatcacccgcgccagcaggtcgcactcctctgtcgagagtgacgacgccaggcggtcagggtgaataccagcggcaaacagcgactcgctggcgtagatattccccacgccgaccaccagcttgttatccatcagccagggtttaatcgccgtcttcttcttcgcgcatttctgctgcaaatattcgccattaaactcatcgcttagcggctccggtcccagatgcgccagtacgttatgcccttccagctctttggtccataaccaggcgccaaagcggcgaggatcggtataacgtagaattttgccgttgctcatcaccaaatcgacatggtcgtgcttttccgccggcagcgcttccggcagtatccgcaagcttcccgacatccccaggtgaataattatccagccgtcaggcagctccagcagtagatatttagcacgacgctgaacgctaaggacgggtgtatcgctcagacgataaatttcatctgaaaccggccagcgcagacggccgttacggatatgggcgtgcaggatagtagcgccaactaaatggggttcaataccccggcggctggtttcaacttcgggtaattcaggcataacgtctccggctgtgtggcaggtctcattaatatggggacggccagaaaacaaaaaaccccgccgaagcgaggtttttgttacatcaaagcgagaattatttgattttcgcttctttgtagatcacgtgctgacggacaactggatcgaattttttcagttccagtttttccggtttagtacgtttgttcttcgtagtggtatagaagtgaccagtaccagcagaagaaaccagcttgattttctcacgaatacctttagccatgatttatttcctcttagtacttagtacttttcgccacgggcacgcagttcagacagaactgtttcgatgccttttttatcgatgatacgcatacctttagcagatacacgcagggtgacaaaacgcttctcgctctcaacccagaaacggtgagagtgcaggttaggcaggaaacggcgtttagtcgcgttcagtgcgtgggaacggttgttaccggtcaccggacgcttgccagtaacttggcagactcgggacatgtctattctccaaaaatcaaattagctcgagcttcgtatggggtatcggcgcctcgtcaggctttacagcctggtcatcgcgcagttctattgaactctcgattgccaggcccaaatgccaaacccgagattctcaaaggtggcgtagtatacgctgacccggcgatatgctcaagtcccgaacagacaaagatcccgatggatcgcgcaaagaatcttaaatccagccgcgttcggcaaaagaaacgtactctccgcgcccaattatcaggtgatcgagcacccggatatccataaactggcaacactttatcacgcgctcagtgataagtttatctgctttacttggctctgcgcagcctgaagggtggttatgcgccagaatgaccgctgaagcattgagtttaatcgcttcccgaacaatctcacgcggatgcacctctacgtggttaagcgtgccggaaaacaggcggctgtgctgaagcacccggtgctgggcatcgaggaagatcaccagaaagatctcacgctcttcgcccgtcagttggctttgcagaaattcccgcgtcatttccggactcagcaacgcactttcctcattcatgcgcacgctgtaatagcgccttgccagctcagcaatgcctttcaactgcgcgaatttcgccaggccgatgccgtttacgccgcgaaactgcgcaaagtccgccgacagcaggccatacagcgacccaaagtgctgcaatatctcttttgccaacgtcataacatcttttcccggcgtgccggtacgtaaaaaaagcgccagcagctccacgtcgctgagggaagcaatgccggatctgagcattttttcacgcggcaataattcgtccaacgtatccatacgcgcacctccttttttaaggaagcggcatagtggcacagcctttgggagagatcgacgccccgattttgttcttgcgtagcgcctcgcaaagtggagcgcaggcaaagacacgacgccgtagagattgtgataaaatagccgcctttcaaagtcacccaacaggaaagacatgatgagcctggccggtaaaaaaattgttctcggcgttagcggcggtatcgctgcgtataaaacgccggagctggtgcgccgtttacgtgagcacggcgctgacgtgcgcgtggcaatgaccgaggcggcaaaagcctttattacccccctgagcttacaggcagtgtcgggctatcccgtatccgacagtctgcttgaccctgccgctgaagccgcgatggggcatatcgagttggggaaatgggccgacctggtgattcttgcccccgcgaccgccgacctgatcgcccgtgtagcatcgggtatggctaatgatttagtctccaccatttgcctggcgacgccagccccggtggccgtgcttccggccatgaaccaacagatgtaccgcgctgccgccacgcaacataatctggaggtgctcgcctctcgcggcctgttcatttgggggccggatagcggcagtcaggcgtgcggcgacgtaggcccaggccgaatgctggacccattagttatcgttgataaggccgccgcgcatttcgctgccgtcaacgatttgcgacatcttaatatcatgattacggcaggtccgacgcgcgaaccgctcgacccggtgcgttatatttccaaccacagctccggtaaaatgggcttcgctattgcggcggccgcagcgcgtcgcggcgcaaatgtcacgctggtctccggtcccgtttcgttaccgacgccgccttttgtaaaacgggttgatgtcataaccgcgctggacatggaagccgctgttcaggccgccgttcaacagcagcacattttcattagctgcgccgccgtggctgactatcgcgcagagactatcgccagtgaaaaaatcaaaaaacaggcggcgcaaggtgatgaattactaataaaaatggtcaaaaacccggacattgtcgccggggtggccgcactcagtgacaatcgaccctacgttgttgggtttgccgcggaaacgaataatgtggaagaatacgcccggcaaaaacgtatccgtaagaaccttgacctgatttgtgcaaatgatgtttctctttcaaatcagggatttaatagcgataaaaacgctttacaccttttctggcaggatggagataaagtcttaccgcttgagcggaaagaactcctgggccaattattactcgacgagatcgtgacccgttatgatgaaaaaaatcgacgttaagattctggacccgcgtgttggtcagcagtttccgctgccgacttatgctacttctggttctgccgggcttgacctgcgcgcctgtctcgacgacgccgtagaactggcgcctggcgcaacgacgttggtacctaccggactggccattcatatcgccgatccatcactggcggcagtcatgttgccgcgttcgggcctgggccataaacatggtatcgtgctgggcaacctggtcgggctgattgattccgattatcaggggcaactgatggtttcgatctggaaccgtggtcaggacagttttaccattgaaccgggcgaacgtatcgcgcaaatggtgtttgttccggtcgttcaggccgaatttaatctggtggaagcatttgacgccaccgaacgtggcgagggcggcttcggtcattctggccgtaagtaaattttacgcatccccataacgtcataatactgccgcaagcgctgagtttgcggttatagcgtgggtgctcgcctggcaagtgcttattttcaggggtattttgtaacatggcagaaaaacaaactgcgaaaaggaatcgtcgcgaagaaatacttcagtcactggcgctgatgcttgaatccagcgatggaagccaacgcatcacgacggcaaaactggcggcctcggtcggcgtttcagaagcggcgctataccgccattttcccagcaagacccgcatgttcgatagcctgattgagtttatcgaagatagtctgattacccgtatcaatctgattttaaaagatgaaaaaaacaccagcacgcgtttgcgcctgattgtgttgctgattctgggttttggcgaacgcaaccctggcctgacgcgcattcttaccgggcacgcgctgatgtttgaacaggatcgcctgcaggggcgcattaatcagctttttgaacgcatcgaagcgcagctccgccaggtgctacgagaaaaaagaatgcgtgaaggcgaaggctacacgacggatgaaaatctgctggcaagccaactgttagccttctgtgaaggtatgctttcacggttcgtgcgtagcgaatttaaataccgcccaacggacgatttcgacgcccgctggccgctcattgccgctcagctacagtaacgctgactggatagtggctcacgccttatccaggcgacagaaacataggcccggtaaagcgccaccgggcaattcgcttacacgccaaattcttcccggtatgctcgcacagccgccagatgctcagccatatcaggtttttcttccagataggcaatcaggtctttcagcgtaatgatggagataaccttacaaccatagtcgcgctccacttcctgaatcgcggaaatctcgccgcggccacgttcctgacgatccagcgaaatcagtacgccagccagagtagccccgtgcgcctgaataatctccattgactcgcgaatcgccgtacctgcggtaatcacgtcatccaccagcatcacgcggccctgtagcgcgctgcccaccaggctcccgccttcaccatgatcttttgcctctttgcggttaaagcagtacggcaggtctttatcgtgatgttccgccagcgcaaccgccgtcgtcgtcgcgatcggaatacctttgtacgcggggccaaacagcagatcaaattcaataccggaatccaccagcgcttcggcataaaaacggcctaacaacgccaggtcgcgcccggtattaaacagcccggcgttgaagaaataggggcttttgcgcccggatttcagcgtaaactcgccaaactttagtacctgcttgttaagcgcaaactcaataaactggcgctgatacggtttcatggattcgctccttttcttactttcatcatttacgaaatttacggacaaaaaaaaggcgacttttcagtcgccttaaaatcaattttctaacgccgccttctgcgtcgccacaatggattcaattccccctcgggccagcgccaacaaagtgagaagttcttcatggctgaacggctcgccttccgcggtaccctgtacttcaataatacggccgtcttcagtcatcacgacgttcatgtcggtttctgctgcggaatcttcaacatattccagatcgcagatcgcttcgccgttaacgatgcctacggaaaccgccgccaccatgcctttcatcggattggttttcagcttaccgttggcaaccaatttattcagcgcatccgccaacgccacgcaggcaccggtaatagacgctgtacgcgtaccgccatcggcctggattacatcgcagtccagcgtaatggtaaattcgccgagcgttttcagatcgaccgccgcacgcagcgcacgcgcgatcaaacgctgaatttccatagtacggccgccctgcttaccctttgccgcttcgcgcgcgttacgggtatgggtagcgcgaggcaacatgccatactctgcggtgatccacccctggccttgtcctttcagaaaacgtggaacgccctcttcaatggaggcagtgcacaacactttagtatctccaaattcgaccagtaccgagccttcagcgtgttttgtatagttacgggtcagggttacgggacgcacctgattagcgctacggcctgctggacgcatattgagatctccggcttaaaacgaatgtggctgcgcattatacggacttccgatggttattcctatcctgacaaggcctggatagctataatcccctcatctctcctttaaaaacgggaacatctatgatccgcagtatgaccgcctacgcccggcgtgaaatcaagggtgaatggggtagcgcgacctgggaaatgcgctcggtaaaccagcgttatctggaaacttactttcgtctgccggaacagttccgtagtcttgaacccgtcgtgcgcgaacgcattcgtacacgcctgacgcgcggcaaagtcgaatgtatgctgcgttttgaacccgatgccagcgcgcaaggcgagcttattctgaatgaaaagctagcgaaacaattagttagcgccgcaaactgggtcaaaatgcagagcgacgaaggggaaatcaatccggttgatattttgcgctggccaggtgtcatggcggcgcaagagcaggatctggacgcgattgccgcagaaattttagccgcactggacggtacgctggatgactttatcgtcgcgcgcgaaacggaaggccaggcgctgaaagcgctgattgaacaacggctggaaggcgtcagcgccgaagtagcgaaagtccgcgcgcatatgccggaaatcctgcaatggcagcgtgagcgcctggtcgcgaagctggaagatgctcaggttcagttggaaaacaaccgtctggagcaagagctggtgatgatggcgcaacgcattgatgtggcggaagagctggatcgtctggaagcgcacgtcaaagagacttacaacattctgaagaaaaaagaggcggtaggtcgccgtctggacttcatgatgcaagaatttaaccgtgagtcgaacaccctggcctccaaatccatcaacgctgatgtaactaactccgctattgaattaaaagtgttgatcgagcaaatgcgcgagcaaatccagaatattgaataattctggcgctcaatatgtcacagagcccgccttatgcgggctctcgcgtttatcggtagtacgtttttaatttccggcgaatagcgtcgataaggcgtcgcttccactctaccgttgaagcccgatactgcataaaaatagcgccttccgcctgctccccggcaagcggcaggacaaaaagaccgcgcttatcggataaattttcataccaggggcgcggtacaatcgccattagcggcgccgactggacagcaggcgcaagttgactgtaatcatgacaaacaaacgccagcggacgttcaaacccggcacgagcctgctgcctgtccagttcgttgttctcttttgtccacggcaaacagtaaatgtgttgataatgctgtagatcagcaaaattcaacgctgtggcattctccagacgtgaacgcaatggcgcgccataaaccgcgatcaaacgcgtagtccccacccgctcgtaatgcagagcgctgacctgcttttgatggtcgccaattgccagcaccaaatcaaccgagctatccaacagttcatcacgccagggtcggcgggcaaaaggaaggcactcgatcaccgcctgatgaagatgacctttctctgcgagaactggcgtaagcagcgcgttcaatgcgggaggaagtaccacccgaaaacaacgggagccgttctctttatcgccaaacagctcctcattaagcgaaacaaacacaggcgccaatttgtcacgcagcgcctgcgcataaggcgtaggaatctggcggttcccttcccgtcgaaacaacgggtcgtttagcgcatcgcgcaatctcattaacgcatgacttaccgcagaaggcgacaaagccagcttttgcgccgttttccccgtagagctcgtctccagcagcacatacagtacttttaacaggttcatatccatttgcagcaagttcattaaacgtctctcttattgaacctggctaaattactgccaggtatactgcgggcgcttcaatcaggagaacattatgaatcgctatgcattattccttgtatgtatattttcaacatcagcacttcctgccatggcggcattagatccttcacaaccgttatcacccgcgcctccgttatcactgtttaaagcgtgggctaagcctataaagccgtttcaaatcacagaaggcgtgtggtatgtcggtacgaaaaatctctcttctattctgctgaccactccggcagggcatattcttattgatgcggggttggatgaaagcgcaccgcaaattaaagcgaatattgaagcggcaggattccgcctcacagacgtgcgctatctgttgaatagccatgcgcggctggatcaagcggggggcatggcacgtttgaaagcgtggagcggcgcacaattggtcgccagccaacccaacgccgatcagatggcgaggggtggacgacaggattttgcgcttggcgatgcgctcccctttccgcccgtcaccaccgataaaattatccaccaccaggaaagcatcatcctcggagggataaccgtgacagcactattcacgcctggacatctgcccggctcaacttcctggcgcgtaacgctccgcaacggcaagacgctaatttacgcagatagtctcgccacgcccgactatctgctgattaacaacaaaaattaccctgacctggttactgatattcagagcagctttaagacactggccgcccagcatgttgatatctttattgccaacaaaggtgaccgcttcgggctactggagaaacgacagcaacttcgcaacggcgatacacaggcattctttgattccaatggcttgcaacagtatgtggaacgctcgcgccagcgcttcatcacacaacttaccgcacagcagccataatgaaataactcaccggcggcgcgtccagggcgccgttcttttaaattatctaagtcaaaatagaaaaacctcgcatacaataaaccacaaaaatgatgttcaatttattgatatttataataaataattattaattataaatttaaaatcattactaaaatttattaatcgtgtaatgccttagaaaatctcaatcgtgatacagcgcacaaatcgttaatcttcgcccccagtaaattagggggaaatcatgctgttgcacgttctttatttaattggcatcactgccgaggccatgacgggcgcactcgctgcgggtcgtcgtcgcatggatacattcggcgtaattattattgctaccgccaccgccattggtggaggctcagttcgcgacattctgctcggtcactatccgctgggttgggtgaagcatcccgaatatgtcattattgtggcgactgccgctgtattgaccaccattgttgcccccgtcatgccctatttacgcaagcttttcctggtacttgacgcgctggggttggtggttttctctattattggcgctcagatagcccttgatatgggcgaagggccaattatcgccgtggtggccgccgtcactactggcgtctttggcggcgtgctccgcgatatgttctgcaaacgcattccactggtgtttcaaaaagagctatatgccggcatttcgttcgcctcggcggtgctctatattgcgctgcaacattacgtcatgaatccggatgtcgtcgttatctctacgctactgtttggctttacagcaaggttattagcgctacgtcttaaacttggcctgccggtattttattaccgccatgaagggcactaagacccaaatccgggaatatgctgagcagccagccatctgctcagcgctttgatctgcagattattccgccagtcgatgactctcccggcacgacgctcgcccgtcgctggtaactgccgccagtgttgctctgttcgcattaataactgctcccatgaacgatcgccgctggcctgtaatgcagcctgcgttaaggggatatccatcgccatgatccagcgggtaaacggctgccggcgcgccaggttaaattgccgccatatctgctcgctttttcctttagcaaagcctggcgtgttggctatttgcgctgacgtcagggtaagccaggagaagatatgctcaaagcgatgcgtctgatgcaaggcccgccagctggcttcacccattccgtccagacccaacgccgaccgtgaccccagccatatcagcctggagataaactgttcctgacacgttgccgacgcgtaaaagcaggtcagcgagttgaaatggctatcaggcggtacaggcttactccgctcacgactccgccagacgacctcatcaagccggggaatgccttgcccggccagactcaccaggatctgatcgcccggcgcgatatcccacgcttcccaacgtttcacagaaccgatattgacccgctgaacccgcttatcatccaatataacggggacaagcgacgctactacggtaattttgccgcttttccccaccgagaactgaatagcgctcacttgcgcgacctgcgctactggcggatatttccatgctgccagccagtcgccctgcccgggtcgccagtgttgtgacgcaggttctttagccatgcgtatcactacgccatccgttacaaagggtaatgctgacgtcagccatgactggcgcgcccgctcgacctcgctggcatcttttaccgccagggtatatttattcgtcagactgaatccagccttagcaagttggcttaatctttcgggcatatttgccggaccgtccggccacgcccaaataaaaatacccaacgaatttagcgcggaggcgttatcctggcgcattaacattcctgcgactttcgagcgcgcattcatcccgcccatccgttgctggatatgtccctcgcgctgtagaaagatttcgccctgtaacaccgcgttagcaagcgcgccttgtgttgtctgcggtatagaggggatcaggcgaatttttggcgtccagtcctcgccttgtagtccgttaccccggctaatggccctggtcagtttaccgttttgataaaccagtgttaccgctacgccatccacttttggctgtacccaaagctcgctgcgcccgcgcatccactgttctaccgcctgtcggtccgcgagtttacgtacgcccgtgtgcgcaacagggtgcattgttgtaccgtttaacggcggtgaaaccggagtagatgaaacatcctgaccaacacagcgttgccactgaaccagccttgcgctgagttggtcgtacacactatcgtcaaccgcgctaaccccttgtttccagtagatgtcattccagtcagcgagctgttgctgtaaacgggcgatttcttcagcggcccttgctggcggccaggccgggcaaagcgccccactctgcgaatgccacaataaaattccccacgccatacttttccataatctcatcacgacctcctgcgcacattgcccggcaggtatagcgctttagtgaataaaaaccgacaggtaaaaatgcatcatccgagccgctttccagattttttggtgggttgctgcaacgacgcgataaaagcggaaaaagggacgcaaaatgcaataatctggcgcaaaaagtgtgacaaagactacgtcgcataacggcgatgtgtataataagcccgtatcaaggctctatttcgataatcacagacgtaagatactcatggctcaaggtacgctttatattgtttctgcccccagtggcgcgggtaaatccagcctgattcaggctttattaaaaacccaaccgttgtatgacactcaggtttccgtttcacataccacgcgcgcgccgcgtccgggtgaagtgcacggtgagcactatttctttgtaaatcatgatgagtttaaaaccatgattggcagggaggcgtttctggagcacgcggaagtgtttggcaattactacggcacttcgcgcgaaaccattgagcaagtgctggcaaccggcgttgatgtttttctggatatcgactggcagggcgcccagcaaattcgcgaaaagatgccgcaagcacgcagcatttttattttgccgccgtcaaagatcgaattggatcgccgtttacgcggccgcgggcaagatagcgaagaagtcattgccaaacgaatggcgcaagcggttgcagaaatgagccattacgccgaatatgattatcttattgtgaatgacgactttgataccgcgttaagcgacttgaaaaccatcattcgcgctgaacgtctgcgtatgagccgccaaaagcagcgtcataacgctttaatcagcaaattgttggcagactgaacccactttcagtatcatgcccagtcatttcttcacctgtggagcattttaagtatggcacgcgtaactgttcaggacgctgtagagaaaattggtaaccgttttgacctggtactggtcgccgcgcgtcgcgctcgtcagatgcaggtaggcggaaaggatccgctggtaccggaagaaaacgataaaactaccgttatcgcgctgcgcgaaatcgaagaaggtctgattaacaaccagatcctcgacgtccgcgagcgccaggaacagcaagagcaggaagccgctgaattacaagccgttaccgctattgctgaaggtcgtcgttaatcacaaagcgggtcgcccttgtatctgtttgaaagcctgaatcaactgattcaaacctacctgccggaagaccagattaagcgtcttcggcaggcgtatctcgttgcacgtgacgctcacgagggccagacacgttcaagcggtgaaccctatatcacgcacccggtggcggtggcctgtattctggccgagatgaaactcgactacgaaacgctgatggccgctctgctgcatgacgtgattgaagatacccccgccacctatcaggacatggaacagcttttcggtaaaagcgttgccgagctggtagagggggtgtcgaaacttgataagctcaagtttcgcgataagaaagaggcgcaggccgaaaactttcgcaaaatgattatggcgatggtgcaggatatccgcgtcatcctcattaagcttgctgaccgtacccataacatgcgcacgctgggctcgttacgcccggataaacgtcgtcgtattgcccgtgaaacgctggaaatctacagtcctctggcgcaccgtttaggtattcatcacatcaaaaccgagctggaagagctgggttttgaagcgctgtatcccaatcgttaccgcgtcatcaaagaagtggtaaaagcggcgcgcggcaaccgtaaggagatgatccaaaaaaatcctctctgaaatcgaaggacgtttgcaagaggcgggaattccgtgtcgcgttagcggtcgcgaaaaacatctttactcgatctactgcaaaatggtgctcaaagagcagcgttttcactcgatcatggacatttacgctttccgcgtcatcgttcatgactccgatacctgctatcgcgtactcggccagatgcacagtctctataagccgcgtccgggacgggtgaaagactatattgccattcccaaagcgaacggctatcagtctttgcacacctcaatgatcggcccgcacggcgttcctgttgaagtccagatccgtaccgaagatatggatcagatggcggaaatgggggtcgcggcgcactgggcgtataaagaacacggtgagaccagcaccacggcgcagatccgcgcccagcgctggatgcagagcctgctggagctacaacagagcgccggtagttcgtttgaatttatcgaaagcgtaaaatccgatctcttcccggatgagatttacgttttcaccccggaagggcgcattgtcgaactgcccgctggcgctacgccggtggattttgcctatgcagtgcataccgacatcggccacgcctgcgtcggcgcgcgtgtcgaccgccagccttatccgctgtcgcagccgcttagcagcggtcagaccgtcgaaattattaccgcgccgggcgcgcgtcccaacgccgcctggctgaactttgtcgtcagctctaaagcgcgcgctaaaattcgtcagttgctgaaaaacctcaaacgtgatgactccgtaagcctgggccgtcgtctgcttaaccatgccttaggcggtagtcgtaagctggcggaaattccgcaggaaaatattcagcgcgaattggatcgtatgaagctggcaacgcttgacgatctgctggcggaaatcggtctcggcaacgcgatgagcgtagtggtcgcgaaaaatctgcagcaaggcgaagccgtggtgccgaccgttgcgcaatcgaatcacggccacctgccgattaaaggcgcggatggcgtgcttatcacctttgcgaagtgttgtcgtccgatcccaggcgacccgatcatcgctcacgtcagcccaggtaaaggactggtgatccaccacgaatcctgccgtaatatccgtggataccagaaagagccagagaaatttatggcggtcgaatgggacaaagagacggagcaggaattcattaccgaaatcaaggtggaaatgtttaaccatcagggcgcgctggctaacctgacggcggcgattaataccaccacctccaatattcaaagcctgaatactgaagagaaagatggtcgcgtctatagtacctttattcgccttaccgcacgcgatcgcgtacatctggcgaatatcatgcgcaaaatccgcgtgatgccagacgtcattaaagtcacccgtaaccgaaactagcgctatgaatccaaaacgttatgcgcgtatatgcgaaatgctcgccaggcgtcagcctgatctcacggtctgcatggagcaagtccacaaacctcataacgtttctgcaatcattcgtaccgcagatgccgttggcgtccatgaagtccatgccatctggccaggtagccggatgcgcaccatggcttctgcggcggcgggcagcaacagttgggtacaggtgaaaactcaccgtaccattggcgatgcggtagcccatttgaaaagtcggggaatgcagattctggcaacccatctttctgataaggccgtagactttcgcgagattgattacacgcgcccgacctgtattctgatgggtcaggagaaaaccggtattactcaggaagcattagccctggcggatcgggatatcatcattccgatgatcggcatggtacagtcgctgaacgtttccgtcgcctccgcgctcattctttatgaagcccagcgccagcgacagaacgcgggcatgtatctgcgtgaaaatagcatgttgccggaagatgaacagcagcgcctgctgtttgagggtggttatccggtgctggcgaaagtcgctaaacgtaaaggtctgccttatcctcgcgtcaatcagcagggcgaaatcgacgccgatgctgactggtgggcgacgatgcaggcggcagggtaatcaccatgtcaggccgcttgttagacgctgttccgctcaattccctgacaggcgtcggcgcagcgcaaagcagtaaactggcgaaaattggcctgcacaccgtgcaggacctcctgctccacctccctctgcgttacgaagaccgcacccatctctaccccattggcgaactgctgcctggcatctacgccaccgttgaaggcgaagtgctgaactgcaatatcactttcggcggtcgtcggatgatgacctgccagattagcgacggttccggcattcttaccatgcgctttttcaattttaacgcagcgatgaaaaacagcctggcgacgggacgacgtgtgctggcctacggggaagcgaagcgcggcaagtatggcgcagagatgatccatccggaatatcgcctgcagggcgatctcagcacgccggaacttcaggaaacgctcacccccgtctatccgaccaccgagggcgtgaagcaagcgacactgcgcaagcttaccgatcaggcgctggagttgctcgacacctgcgccattgccgaactactgccgccggaactggcgcagggtatgatgagcctgccggaggcgctacgtaccttgcatcgcccgccgccgacgctccagctcgccgatttagaaaccggcaaacacccggcgcagcggcggcttattcttgaagagctactggcgcataatctcagtatgctggcgcttcgcgcaggcgcgcagcgctaccacgctcagccgctaagtaccaacaacatattgaaagacaagctgctggcgtcgttgccgtttaaacccaccagcgcgcaggcgcgggtggtagcagagatcgaacgtgatatggcgctggatgtgccgatgatgcgtctggttcagggcgacgtgggttccggtaaaacgttggttgcggcgcttgccgccttgcgcgctattgcccacggtaagcaggtggcgctgatggcgccgaccgaattgctggctgaacagcacgcaaataatttccgcaactggttcgaaccgttgggcgttgaagtgggttggctggccggtaagcaaaaaggtaaagcgcgtcaggcgcagcaagaggctattgccagcggtcaggtgcagatgattgtcggcacccacgctatcttccaggaacaggtgcagtttaacgggctggcgctggttattatcgatgagcagcaccgctttggcgtccaccagcggctggcattgtgggaaaaaggccagcagcagggctttcatccgcatcagttgattatgaccgcaacgcccattccgcgcaccctggcgatgactgcctacgccgatctcgatacctcggtgattgacgagctaccgccgggccgtacccctgtcactaccgttgcgattccggatacccgtcgccatgaaatcattgatcgtgtgcgcaacgcctgcacaaccgaaggccgtcaggcctactgggtctgtacgctgattgaagagtcagacctgctggaagcgcaggcagcggaagccacctgggaggagctcaagctggcgttaccggagttgaatatcggcctggtacacggccgcatgaagcccgccgaaaaacaggcggtgatgcaggcctttaagcagggcgaactgcatctgctggtcgccactacggtgattgaggtgggggtcgatgttcctaacgccagcctgatgattattgaaaacccggagcgactgggcctggcgcagttacaccagctcagagggcgcgttggccgtggcgcggtcgcatcgcactgcgtgctgctctataaatcgccgctgtcgaaaacggcgcagaagcgtttacaggtattgcgcgacagcaacgacggctttgtgattgcacaaaaagatttagagattcgcggcccgggggaattactgggcacgcgccagacgggtaacgccgaatttaaagtagctgatttgctgcgcgatcaagccatgatccccgaagttcagcgtattgcccgtcatattcacgaacgttatccacagcaggcacaagcgctgattgagcgctggatgccggaaaccgaacgttattccaacgcctaatcctattcgccgcgcgacagagccaacagaagatcctcaatctggatagcgataacgtcctgggctgccagggcatcgcgcgagatacgcgttgccatcgcactctccggctcgtcccgcagcatttccgccgccttctgcaccccgtcgaggatcatctccgacgttaactgccgggttaaaaacgccagattattttccaaccacggttcttccgtcgcacctaatggcggttgccactgccacgagccttctggccaaagcgggttaacctctaccggataaattaaatgtgcggcgtactgcaacgcgcataccgctttacccggcgtatccagtaaccaccactgattccagagcgaacggataaacggcgcaatgccgccgagaacattgaaggtatccagccaggtcagcggagagttgaaaccgcgctcgtgattgattcgcgccagcatggtctccagcaaaaaatgccgtacctgctgacgctgagcggcatccatcatttcccgccagagataaggccgccgtaacgcacgcaggaaagactcctcgaagtgatcgccatagccatgggttaacagcgtttcgcgccaacaggcaaggcacagcggaaacagataacgaaacaattccggctgcatcggttcgtggtaaaccagattcagcacataataaacgctcagatgccaatcggtaatctgccgccagtccgtcgccgccagcgcctgcaactcagcatcggcatagtcaaactccgcttcccacacgttaagaaccggcggctcatcgccaaaaatatgacggcagcgttcacgcagggtttcaggttgacggcaacgttttttcatctttatccggcaaacattggcagcatcaggtacagcttgatcaccaacgcattgacgatatcgataaagaacgcgccgaccatcggcaccaccaggaacgccatatgcgaggggccaaaacggtcggtaatcgcctgcatattagcaatggcggtcggcgttgcgccaaggccaaaaccgcagtgacccgccgccagcaccgccgcatcatagtttttccccatcatgcgccaggtgacgaagatcgcgtacagcgccatgaagatggtctgtaccaccagaatcgccagcatcggcagcgccagtgacgccagttcccacagcttcaggctcatcagcgccattgccagaaacagtgacaaactcacgttccccagcaccgaaacagcacgctcaaatacgcgataaaaacccaccagcgccaggccattgctgaggatcaccccaacaaatagcacacaaacgaagaccggcagttcaagcaccgttcccgccagtagctgcgctacgattttgcccacggtcaaacagatagcaatcagggcgatggtttcgattagcaccagagaggtgatcatacggcccacatccggcttttcaaaggctgtcggcacggcctgatcgtcaggcattccatccggcgtggtggagtgtttcaccagataacgcgctaccgggccgccaatcaacccgcccagcaccaggccaaaggttgcacatgccatcgcaacttcggtggcactggcaaaaccataacgttcgacaaacagtttactccacgccgcgccggtaccgtgtccgccggacagcgtaattgacccggcaatcagccccattaacgggtccagccccaacagactcgccatgccgataccgatggcattctgcatcagcagtaatccgaccacgacgaccaggaagacgccaacaacgcgtccccccttgcgcaggctggcaaggttagcgttaaggccgatcgtcgcgaaaaacgccagcatcaacggatcgcgcagggtcatatcaaagttgacctcccaaccgacgctttttttcagtaccagcagagcaaccgcgaccagtaatccccccgccaccggttccggaatcgtatatttcttcaataaggagacagactggaccagcttgcgacccagtagcagcaccagcgtggcggcgacaagggtcgataaggtatcgagttcaaacatttaaagctcctgtagtgcgctgtgacatgtgcgcacaaatcatttcctgagtcagttttttagctctttgcgagtcttcggcatggattttaagcagaaaaaggcaaaaagttatataaaaaggtgcatttatcttttttaaatattaagaatattcgctcgcaatcgtttgcttttaccatctggtcagataaaatcaccgcttttccaccacgagaatgtccctgatgtccgttaacgccatcgagccggcagatgcgcaaccggttgcgcagacgcaaaacagcgaattaatttaccgtcttgaagatcgcccgccgctccctcaaaccctttttgccgcttgtcagcatctgctggccatgtttgtcgcggtaatcacgccagcgctgttaatctgccaggcgttgggtttaccggcgcaggatacgcagcacattatcagcatgtcgctgttcgcctccggcgtagcctctattattcaaatcaaagcgtgggggccggtaggatcggggctgttatccatccagggaaccagttttaactttgtcgccccgctgattatgggcggtaccgcgctgaaaaccggcggcgcggacgtcccgacgatgatggcggcgctgttcggcacgctgatgctggcaagctgcaccgagatggtgctttctcgcattctacatctggcgcgccggattatcacgccgttagtctccggcgtcgtggtgatgattattggcctgtcgctgattcaggtggggctaacttccatcggcggcggctatgccgccatgagcgacaacacctttggcgcaccgaaaaacctgttactggccggcgtcgtcctggccattatcatcctgctgaatcggcagcgtaatccctacctgcgcgtggcttctttggttattgccatggcggcaggctatcttttggcctggtttatgggcatgttgcctgagaataacgcgccggtctcacaggacatcctgatggtgccgaccccgctgtattatggtctgggcattgactggaacctgttactgccgttgatgctggtctttatgattacgtcgctggagaccatcggcgacatcaccgccacctctgatgtctccgagcagccggtatccggccccttgtacatgaaacggctaaagggcggcgtactggctaacggcctgaactcatttgtttcagcggtatttaatacgttcccgaattcctgtttcggtcagaacaacggcgtcattcagttgaccggcgtcgccagtcgctatgtgggatttgtcgtcgcgctgatgctgattgtactcggcctgttcccggcggtaagcggttttgtgcagcatatcccggaaccggtgctcggcggcgccacgttggtgatgttcggcaccattgccgcctccggggtgcgtattgtctcgcgtgagccactgaaccgccgcgcgattctgattatcgccctgtcgctggccgtgggtcttggcgtctcgcaacagccgcagatcctgcagttcgcgccggaatgggtgaaaaatctgctctcatccggaattgccgctggcggcatcacggctatcgtgctgaacctgattctcccgccggaaaaaccgtaaaaaccctgcggcggcgacacgattcgccgctgctgtaacgctctttcaccattcctgtcttgaggattgcacgcaaatcgtgcataaatcccctatgtgcatttcacgggatggaagaccatgaaattgattgggaggttgcttctctacgtgctgatcgcctgtttagtggtgattttcggcttttattttctgctgcaaacgcgctggggcgcagatcatgtcagcaactgggtatcagagaacagcggttatcacctcacattcgacgtgatggatcatcgtttttccgccccatcccatcttttactggagaatgtgacctttggtcgtgatggtcagcctgctaccctggtcgcgaaaaccgtagatatcggtctgagcattcgccagttaaccgcgccgctgcatgtcgacacgattctgttacaggacggcacgctgaatatttcagtgcaaaccgcccctttcccgtttgaggccgaccgcctgcaacttcgcaatatggcgctcaatagccccggtagcgaatggcgattgagcgcccagcgcgttaacggcggcgttatgccctggcgccccgaggccggtcgggtattgggcaataaagcccagatccaactgagcgctggttcgctgacgttaaacgacgttcccgccacgaatgtgcttattgaaggcagtatcgaccataatcaggtgatgttaaacaccgtcggcgccgatatggcgcgcggagcgttaaccggcgtcgcccggcgtaacgctgatggtagttgggtcgttgaaaatctgcggctgaatgatattcggttacaaagcgataaatccctgagcgagtttttcgcgccgcttactacggttccatctttgcagattagtcgtcttgaagtgacggactccagcctgcaaggaccagactgggcagtcaccgatcttgacctgagtttgcgcaatctgactctgcgcaaagaagactggcaaagccaggaaggtaaattatcgatgaatgccagcgagtttatttacggctcactgcacttgctcgatccaatcctgaacgccgaattttcaccacagggcgttgcgctacgccagttcactacccgctgggaaggcggtatggtcagaacttccggcgcctggttacgcgaaggcaaagcgcttattctggacgataccgctatcgccgggctggagtatacgctgccggaaaactggaagcagttatggatgaagccgctgcccgactggttgaacagcctgacgctgaaaaaattcagcgccagccgcaatctggtgattgatatcgacccggccttcccgtggcaaatcaccgctctggacggctacggcgcaaacctggagctggtacaacatcatcaatggggcgtctggagcggcaatgcgaccctcaacgccgcagcggcaacctttaaccgtgtggacgtgcgccgcccgtcgctgtcgttgacggctaatgccagcacggtcaacatcagcgatctgagcgcgtttactggaaaagggatactggaagccactgccagcgtatcgcaactgccgcagcgtcagacgcaaatcagcctgaacggacgcggcgtaccaatggatgtgctacagcagtggggctggccggcattaccgattgctggcgatggcaatattcagctcacggccagcggcaatattcaggccgatgcgccgttgaaaccgacggtaaacgggcaattacacgcggtcaacgcacaaaagcagcagataacacagacgatgcaagcgggcgtggtgtccggcggggaagttacgtcaacggagccaacgctgtaattgagggcttgcccggtggcgatggcgcttaccgggcttacggttcttgctcatttgtaggccggataagcgcagctcacggcgccatccggcgattcagatttaaagcgtaatcaccacttcatttccctgcggggtgaccactacgcccagttcacttcccgcatatgagccgcatttggtaccgctaatctgcgtaatattacgcagacacagcgtccagttgcgcgccttgccttcgccgctcaccgtaatggtattgcctgtgcgtttcgcctgcagcgtaaagattgtcgaaccatccgtagcagggacttcgcagaccgcttcgcagccgtcatccagatggaataactggaaggccgtaccctcatgccaggcgtaatcgggcttctggctattgttgcccagcgccagtagtgtattgtcacgcacgtacactggcagactcaggaagtcatgctgctgtttatgccagcggctgccctgcacttcatcgttgcgccacaggtgcgtccagcggccttctggcaggtagaactccacgtcgcccgcttcactaaataccggcgctaccatgaccgcatctcccagcatgtactggcgatcaagataatcacacgccggatcgtccgggaactccagcatcatcgcccgcatcattggcgtaccggcttcgttggcacgcgccgcttcccgatacagatacggcatcatccggcacttctgttcagtgaagaagcgcaccacgtcacaggactcgtcgtcataggcccacggaacccggtaggatttgctaccgtgcaggcggctgtggctggagagcaagccgaatgcgcaccaccgcttgtagacatgcgccggcgcggtattctcgaatccgccaatatcatgactccagaagccaaaccctgacaggccgatggacagcccgccgcgcaggctttccgccatcgattcgtagttggcgtagcagtcgccgccccagtgcaccgggaactgttgcgcgcccaccgaggcggaacgggcgaacagcaccgcctcttcaacgccgacggtctctttcagcacgttccacaccagttcgttgtagatgtaggcataatggttgtgcattttctgtggatctgaaccatcaaaccactgcacatccgttggaatgcgttcgccgaagtcagttttgaagcagtccactcccatctccaccaggcccttcagcttgtcggcataccattcgcaggcttgcgggttggtgaagtcgtaaatcgccagtcccggctgccatttatcccactgccacaaggagccgtccgggcgttttagcaaatatcctttctctttcagctcctggaagaccggggatttctggccgatgtaggggttaatccacacgcagactttcagccctttcgctttcaggcggcgaatcatccctttcggatcggggaaagtcaccgggtcccattcaaaatcgcaccactggaaggccttcatccagaaacagtcgaagtggaagacgtgcagcggcagattgcgctcggccataccgtcgataaaactgttaacggtcgcttcgtcgtagttggtggtgaatgaggtggtcagccacaggccaaacgaccaggcgggcggcagcgccggacgacccgtaaattgggtatagcggttcagcacgtctttcggggtcgggccgtcgatgacgaagtattccagatactcgctctcgacgctgaactgaactttggagactttctcggagccaatttcaaacgacacgcactgcggatgattcaccagcacaccgtagccacggttggtgatatagaacgggatattcttgtacgattgctcggtgctggtgccgccgtcgcggttccaggtctccaccgtctgaccgttacgcaccagcgcggtaaagcgctcgccaagcccgtagacggtgtcgcccacgccgagatccagacgctcgaacatgtagttgcgcccgctattggtgtcctgcacatagccgttatttttcaactgactaccggtgatacgtacaccgttacgcagaaaatccagtgaccagatctcgcctttggtgacgcgcacgctcaggctgccgctcttgagttcggcaaattcggcgttgttctgcatctccacgttgatatcttgcaagacattgagcggataatgtgggccgttatccaaagcgccctggaagtgttccatccgtacacctatcactccttcctgcggcgagaaaaagcgtagggtaaacaacggggtatccagttgccaggttcgttcgcggacatcacgcggcgcggcatagatcaccatctcattcccgtgctgttcaacgtcgaacacctgaaccgggtgaatcaaattaaggccaggctggatcagccagtttccgtcgctaattttcatagtctgttcctttagttctgcaattctttatgggtaaattcttgttcattacggtgtgcgccctgcgccagttgttccagaatggttttcaggaacgggcttttcagggtgtagtagcgtttagcgatcgcggcgctcagcagataacagatggccgggacgatagtgaacagagcgatgatgatgctgatcgtggcgctgttttgcgttttcgccgccgcgtcgtaaccgccgcctgccagcatccagccaatcagcgccccgccgagggcaagacccagtttcagcacgaacaacgtgccggcaaaactgatccccgtcaggcgtttgccgttacaccattcgccatagtcgacggtgtcagacatcatcacccactggataggcgtgactaactggtgcaatacgccaatcacaaagataaagacgaacatagcgatcgtggcgtgcatcggtacgaagaacatcgccacgctgattactgcgagtaaagcattggtccaccagaaaacgctcactttgcatttccagtcggtcaacggttttgccagcgccgagccaatcaggttgccgacgcaataggtggtgaggaaggcgacaaacacgcccggtttgcccaatatccaggtgacgtaatacatcatcgccccgccgcgcacgcataccgccagaatattcaggatggtgagcaggccgactatgcgccactggtcgttgtgccagatatcacgcaggtcttcacgcatggaggtatgggtggcaggcgcttcaacgcgctctttggtggtaaagaagcagaacgccagcatcaggaacgccaccaccgagagcgccgcgatacccccctggaagcccagcgccttattctcgccgccaatcagtttcaccagaggcatcatcagtacggtagaaagcattccgcccgccgttgccagcacaaagcgccaggattgcagggagatacgctgcgttgggtcattggttattacaccccccaacgcgcagtaagggatgttgaccacagtgtacagaagggtgagcaacgtgtaggtgatggcggcataaatcattttgccgttcagactgagatccggcgtgctataagctagcacacaaacgataccaaacggcaacgcgccaaacagcacccagggtcggaatttgccccagcgagagcgggtgcggtcggccagcaggcccatacaagggtcggagatggcatcaagcgcacgcgccagtaaaaacatggtgccaacaaaaccagcgggaatgccgaaaatatcggtatagaagaacatcatatataacatgacgttatcaaagatgatgtggctggcggcatcgcccataccatagccaatcttctccttaacggagagaatttcacttttcattacgcatccttaacgctcacaacgctcactaataccggttacagtttttgtaaaccttccctgcgagcgtgaatattccgttatttggttatcaaattacgattcttgttttctgtgatcagggtagcgtcaaaaagtgtgatgaaatgtaactaatggattttatgggggtttatatgaaaccgatcatggcagaaggaaagggaagttaaaaaagcacgggaggggatgtggaaacgccaggaagtagctataatgcgcgcgcctccatgtagcaatcgaggcgcggaagatcgtcgtctccggtgaggcggctggacttcaaatccagttggggccgccagcggtcccgggcaggttcgactcctgtgatcttccgccaacatccttctctcatgcccaccattcgtcctctatttcgggacaaagtatttgcttattattaagactagttcttgcatataatacgaaaggaaaggtggatagagaaagtggaatattattttattaatcaccatttaccgattgctaaaaccgaacgtccatttattgtgggatatcgtctgcaaagaagggataaaagtacgccaggactaacgcgggcgggacttaactaatcaccaaacgaacttgtgggtcatacttacaggctcatcctttctcaaaagagatacgcttaccaggccaaaattatgagatcaacgtatagagccatccggataaagatacatgcctccctccagatacacgggttctccttcttctaccgctaaattatgatatagcgattgcatttcatcatctgcactttcttccggttggttttcaactcgataataggtatctacatcatagttctgtttacggagatcgtcgtcgctgtatacgccaagccgtttttttaagcctgttatattaaatatccattttaacccatctttaatataataggcatcaccataagcattttcatcggggcattctttatagcccatccgcaatgcaacatcacagccatgcttaccaacatatttataactcatatcccccccaatatgttgcttcaatatcccagataaaattcataacgaaaacctatcctgataacctatgccacatgaaggatacaatttaaactaaagtacgcgttatattatcccctaagtccgtatcaagtatgcgtattctgtagtaggtagtaatatgttctaatttattaatgtgagttatatatgaagagattatttacagcgatgattatcgcttttattaccgtcacggcatcatccagtgcgcttgcctgcccaaagggtcaacatccacatgggggtacaggctcacatcataagggtggatggtgttcatacgagcagtaacgtcgcagcttactcatctacttgaaggcactatagccttacgtttatcaacgcaggcgctacgtttgtcgatgccgtaactttctgaagaaaaaacatgaacgagttggtatcgatcgcaaagaatatggttaccaacaacagtcaccttgtctccaggctgtcgatattctacggacacgacaggaaaggattttattaattccttagaaaaaccatgttaatcaacaggataaatagttaaaacgtgataaaaggcgtaacctttgcccgcttaaagcgggcaagattgcaggcaagagatgttattatactaaaacataaaaacaggtgaggctggtgtaatgagaatcgacaaactttcactgcttaactttcgttgcttcagacagctcgatattacttttgatgagcacattacgattctggttgcaccgaatggcgcgggcaagacgacagtgctggatgcgatacgcctggcgctgtttccctttattcgtggttttgatgccagcctctacgtaaaagataaatcgctggcgatccgtacagaagatgtacgtctggttttccgccccgaagcgctgaacatggaaatgtcgtctccggccatgattacggctaccggggaatgggaaagtggaaaaacggcaacctggatgctcgacaagcgaggagaacagccgccgcatgaagataagacagcggcgcagcttacccgttggggtgaacaacttcagacgctggtgcgtgaagagcataatttgcagcaggttgagcttcccctaatgctttatctggggactgctcgcttgtggtatcaggaacgttatgaggcacagcctactgaacagcgtctggataacagcgccttttcacgtttgtctggttatgacgattgcctttctgccacatcaaattataagcaatttgaacaatggtatagctggttatggcttagctaccgtgaacatcaaatcacacaacttgaatcaccttcagcaaagttaaaagaaggtgttcgtgttcagcggatgaaagaagctattcaagccatccagcaagccattaactgtctgacgcaggaagtgactggctggcacgatctggaatacagctccagccataaccagcaattggtgatgaaccatccacagcacggtaagattcccttatcccagctcagcgacggcctgcgtaatgcggttgcgatggtagcggatatcgcgtttcgctgtgtcaaactcaacccccatttacgcgatgaagccgccttaaaaacacaggggattgtgctgatcgatgaagtcgatatgttcctgcacccagcctggcagcagcaaattatccagtctttgcgcagcgcatttccactaatccagtttattgtcactacccatagcccgcaggttatcagcacggtaaaacgtgagtctgttcgcctacttgaacaggacgagaaaggtaatggtctggcgtcaataccagcggggcgacctacggcgagccaagtaatgatgtactgcacagcgtgatgggcgtcgatccgcaacctccggttaaggaacaggatgttttcgaacgtgggattatcaatgtatttaaggggttaagccaggagtacaaaaccaataatccttgttatttcggcaagaagattatcgtcaacaatctggtgaagcatgaccgatggggctacagcctgaactggggctggcgacgcgaccagctcgccgatctggaacgaatactctacctgctggatagtaaaaccattcctgacaaccggcatgatgtctctatccggtttatggacttcgtgcgcgataatccgcgtgagcaggtctttgaagacgatatgttcaccatccgctacttttagaagggcagcggacatatcacatttaagcgtctggatctggtggagaatatgaatgatatcgtggcgaagcattatccgggggcgctgcccgcaaaataaacgctatctgcgtaataagcttcaccaggaatttctggcatactaggcagattacggcattgcgagtcagatataagcggaggcggcatggcagacaaatacttaacccaatccccggcaggcgaatttgttatgtttgccagcgatgacggtgaagttcgtgtggagtgccgctttgagcaagagacgctatggctccctcaggcaaccatcgccaacctttatcagatcactccccaggcagttacacagcacattaaagcgatctatgaagaaggcgaacttgagcaaaacgcaacctgtaagtcttacttacaagttcaacaggaaggtagccgtcaggtaagccgcaacaggcttcactacagcctgcctgtcatccttgctgtcggctaccgcgttcgttccccgcgcggcacacagttccgccagtgggcaacccagacgctccagaaatacctgatcaaaggttttgtgatggacgatgagcgcctgaaaaatccgcccgtgggttcatcggctgtacccgactattttgatgagatgctggagcgtatccgcgatattcgcgccagcgaacgtcgggtttatttgcgggtacgagagatctttgcgttagccgccgactatcaaccatcgctcaaagaaaccacgcaattttttcaaaccatccagaacaagttgcattttgcctgtaccggacataccgctgctgaactcattcatcagcgtgctgacgccagccagccgcatatggggctgaccagctataaaggtgaagaggtacgtaaggatgacgtgacggtggcaaaaaattatctcactcaggatgaagtcagcgagcttaaccgcgtagttaacatgtggctggattttgccgaggatcaggcccgtcgtcgtcagcagatctttttacgcgactggcaggataagctggatcagttcctgcaatttaacgaccgtgaggttttacaaggcgcaggtaaagtcactaagaaaatggccgatgaaaaagcgcaggcggaatatagtcagtttgctgaacaacaacggcgcttaaaagaagccgaaggtgagaaggatatcgccggtttgctacaatgggaaacagaacctaaaaagtagctcagaatgccccgaaccccacaagcaaaatcatttgggggcacaatagtgggcaccagtaaaaatccaacaagataaaaatcaataaattcaacagaccaagatatcaaattagactcctgtgattgcatgataccgtcgtgaatatggcggttttatccaggcgtaaagactgtgggtagtaatatcaagacgtgttgcgacgctggaaacagaatggccgcgctcaataacctgttttaccgctttaattataaactcttcgggataacgtttaccgctcatgggctcctctctttaagctatcttaaatgactctgcggtgtctgttaaacctgtggcgattcatttaattttttgtacgtatcccacataatcgtgctattcacatttagagatcacgtcatcgatctgctaacgaaggaatctctatgtgtaaatcccgtctcactgagcatcagaacatcgccgtaattaagttggccgaagccggatgaatggttaaagatatctgccctgaggcggatatttgtgaagtgactgactatatctatggacattgggtttcaccacatcctgtttctcactaatgtgctccgggaaagagttttcatcagatgagcgattgaaaagagaagccagaagctgaagttgcttcgaccaataagtctgtcacttgctcagactgtcacgatcagaattaagtcagaccaacttattggcaaggtataactcccggcattaagttacaaaattttctcatggcattagcattacacctccttaaagtttacatgcgtctctataaaagagtcttaaatttgtatataagaagttgatgagagcacaaatttcaccattaagtcattgaataacaatgcaataaaagaaaaaatcttaaattaggttttaataataagaattcattacaggttgacaggaattacttttatatttcatcacatcaccccgatagtgacgaaggcagcagacagatggtattgagaaccgttatttatcaccctcatgatttagcaaatagtgctgttttaagattttttatgatattggagatactgtataaaaatctcaatgagtgaaatacgaatccgaaatgatgtattacgactgtcggatctgtcatggttccttaaagctgtattttaggtctttccaggagtttatgacactgacaatatttcgcgacttttgacagtcgtagtactttatattatctggattgacacatttatttaccaatgaaatattaatagaaacatcgacaggagtcgttcaggatgatgagaaagccttcacaaattgtccattgcattagttgcgatttatcctgtcaattatttcctgacagcgcagtacgggtgcaatactgtcataatgcggcattttccatctggccagatggtaatgctttcctgaaaaaagggtttattgaaaagttattgcttgatagacacaatcatttatccagcggttttatctttgttgatttttctttcccgaatcttcgacgatttaccgatttgcaatgggctgacagtctggcagacagtggcatgcatattgtcctgatttctgacagaagtttaactccgctggccaattactggattttgaaaagcaataaaatacaagggattatttattccgatgacgatgatattgtgcaacagcaaaagatgcaccgcttgtttaccggtcggctcgccaacagtaaacgtggacgaacgcttaactatacggaatttatattactgaagcgctttgtatcaggaataagtattcagcagattgtaaatattgacaatattgatattaagaaactttatgtgcataagctgcggcttgaaaataagctagggcatagcattcataaaataatatcaaatattttatagatccgtttccatttttattatttccatattattgcgatgtggaagacgctttacgccataatgcaggaggcagaatgccaactccccaaaattactcattcatcgccatagcggtatcagcagcattagcctctatggtatttccctcccaggcggcctgggttgacgttgatagtctgccatccagtgggctggtcagtcagttgccgccggaattacaggctattattcccgctcaggccagtaccggtttcaccaaagtcgggaccatgcccaactacgtttatcagtggaacaccggcaccatcccggtttatggcaatggcctcacgcttaatgggccgggcgcggaggcgtttgaacacactgtcacggttattcaaaacagcgggacgggaagtccgggcgtgatttttggcaacgacctgaccattcggacgcagtcggcgaatgccgcgaataatggtagagacgtcgatggcatccgtactcacggcgcgaatactccggataacccggtatttattattaccggtgaccgtacccgcatctacgtggatggtcaggatggtgacggtattaacgccggatataactcactgggccagggttggaccggatcggccaatatttacgtcggcgacgatctgtatatcaaaacgaccggtagccagggacgtggcattacagccaacgccatgcgggatgcgtcacgtgccaaaaatacgattgtcgtcggcaatcgtgcgcatattgttactaccggcgacagttcggaggggctgcgtaccggacaaagcggttcgttgattcgtctgggtgacgatgcaactatcgaaacatccggcgcatcctcaacggggatttacgcagcatcctcctccagaaccgagcttggcaacaacgctactattacggtgaacggtgccagcgcacacgcggtatatgcaactaacgctaccgttaatttgggagagaatgccactattagcgttaacagcgccagtaaggctgcatcctatagtaaagcccctgccggtttatacgccctctcccgaggcgccattaatctggcaggcggtgcggctattactatggcgggcgataacagtagcgaaagttacgccatcagcacggagactggcggcattgttgacggttcttcaggaggtcgtttcgtcatcgacggtgatattcgtgctgctggcgccaccgctgccagcggtacgctaccgcagcagaacagtacgattaagctcaatatgacggacaactcgcgatgggacggggcgtcgtacatcaccagcgctacggcgggcacaggcgttatctctgtacaaatgagcgatgcgacctggaatatgaccagcagctcaacgctcactgacctgacgctgaatagtggcgcaaccattaacttcagccatgaagatggcgaaccatggcaaacgctcaccatcaatgaagattatgtaggcaacggcggtaagctggtctttaatactgtgctcaacgatgatgattccgaaacggacaggctgcaggttctcggcaatacttcaggcaacacatttgttgcagtaaataatattggaggagccggggcgcaaaccattgaaggtattgaaattgttaacgttgctggcaattccaacggtactttcgaaaaagcaagccgtattgttgccggagcctatgactacaacgtggtgcagaaaggtaaaaactggtatctgaccagctacattgagccggacgaaccgattattcctgatccagtagaccctgttatccctgaccctgtcgttcccgatccggtggaccctgatccagtagacccggttatccctgaccctgtgattcccgatccggtggaccctgatccagtagaccctgagccagtagacccggtcatccctgatccgacaattcctgacatagggcaatctgacacaccgccgataacagaacatcagttccgtccggaagtgggcagctatcttgccaacaactatgcggcaaatacgctgttcatgacgcgtctccatgaccgtctgggtgaaacccagtacaccgacatgctgacgggtgagaagaaggtcaccagcctgtggatgcgtaacgtcggcgcccatactcgcttcaacgatggcagcgggcagctaaaaacccgcatcaacagctatgtgttacaactgggaggcgatctggcacagtggagcactgacggtcttgaccgttggcatattggtgcaatggcaggttatgccaacagccagaaccgcacgctgtcgtccgtgagtgactatcattcccgtggtcaagtcaccggttacagcgtcggcctttacggcacctggtatgctaacaatatcgatcggtctggggcttatgtggatacctggatgctgtacaactggtttgataacaaggtcatgggtcaggatcaggccgctgagaaatataaatccaaaggaattaccgcctcggttgaagccggttacagcttcaggttaggtgaaagcgcgcatcaaagctactggttgcagcccaaagcgcaggtggtatggatgggcgtgcaggctgacgacaatcgcgaagccaatggtaccctcgtcaaggatgataccgccggtaatctgctaacccgcatgggcgtaaaagcctatattaacggccacaatgctattgataacgataaatctcgagagttccagccattcgtggaagcgaactggatccataatacgcagcctgccagcgtgaagatggacgatgtcagcagcgatatgcgtggtacgaagaatattggagaactgaaagtgggtattgaaggacaagttaccccgcgcctgaacgtatggggtaacgtggcgcaacaggtgggtgacacaggttatagtgatacccaaggaatgctggggatgaaatacagtttctgattcaggtaacaacagagccgctgatcttcagcggcttttacccggaaacgctttcatttggctgataggtttcatgaacggctcccaaaaaagcttaatgcgtacagaaaaatatcgggcgtttcccgatggtgaacataaagccacgatggccctgagtcaggatggtgtaactgatacttttccctggatagacataaaaatcgggtaaaaccgtctcgataaccgcatcggacagtgtttcgtcacgcgtgactttgttgatatccgtcgatataaaatgggtgctgtctttattttcactccatacataggaaacatcacggcggatcacgccgctcattttattatcgacgtaatatgttccgctgatggaaaccaccccagtgcgttttttcagcgaatacataaaatccagcgtcaggttagcctgagtgttgttataaaacacaatcacaggcgccgtacatttctctggatcccggttcttttccgtatacaaatgaaaaagatgtccaagccctacacccagacacagtagcgtcaggcaggctaacatcagtgcctttttacccatgtgtcaccccgcggaaaaaaagcgtcacgcagcctgtatcaccgcgcgttttataaggttgctgacaaatcaatgccgtaaccgctggggtgcgactgctggaagggaaatagacccatgggtatttctgacaatccataccggtttttagaatcattgacttatagcttgcaaagcggctgccgctttcgatatcttcattccgcgagaaaaaatgacagccctgagttgtttcaaccagcgtgtagcgatcgtaaaaatccttatcgggaacggtttgccagcttatagtgccaagcaaaataccgacagcaaatgtcccggtcatccaaagtacaggtacataatgtttaaaccaacgccctgacatacgcggtggcgtctcaccctttttttctattgcctgagcgaagtctttgcggatggtcatgaggctcacacctggctcaatctgaaagcctctacgcggaaccgtgattatcagcgtatcttcattttcgccaacggtacgtaatccgcggcgaataatggagatattctgataaagcgtatttgccgacaccaccatgccgtcttcttcccacactttttgaaagaatgtttgttgtgagacgacggagggggcgttttccagcagaaggcgcaagcagcggctggcgggcgttgtcagaataatgttgagatctggcctcgataatgaagccaggcgattcatttctggattaaattcaatattatcgttaattatccataacatcgcattgttaccatgccaaaacataacgtagttggagagggttaatagacaccactgagtatagtctgatgctgtggctgcgtagcaggacatggattgtcccctgcacataccgatcatatagaagagcgagaggcataagacattaacaggtaagcgtagacaccgcttttctcattatagcagactcaggggtgaaagtacgtttggttttcttgttcgttaagtctcctgttttgtattgaggtgagaatatcacctttaatcaagtggccaaatttactgtgccactacgctttaatatcttatatataaatcatgagaaaaaatatcctgataatctaccccacatgaaagacaaggttttattcaatgtgttcctataatggcttgtaatatcccaaaaagcagcactcgttatatagggatagtttccaatttattaagagttacagtagccatacttaataaaagcacgcttcccacttaatatttaagctgtgctttatgttatttaaatataaataagttaatccttaaccaacatatttcaaatttataccaaataattttaaaactatctatcagaaacaatttgtaggggcatagtttgttttttcaatcaataatcctctctgacatgtaaaatagaaacatttattcataatatgaatattgttgtgataacaaattcgcgtgaaagtaaatcgactgaaggtgatgccgatgaatattccttcagaaagaactcaacaggttaatccagaatcggcaacggattactgtcatcagcttaaaaacggaaatcgccccggcgattaatgactttaacactgatagtgactatcagtgaaaggcaacaacaaggaatgaattatgtctacacccgcgaattttaacggtcaacgccctgccattgatgctaacgacgcagtaatgctgctgattgatcaccaaagtggcctgtttcagaccgtcggcgacatgccgatgccggaattacgcgcgcgcgccgcggcgctggctaagatcgccaccttatgcaatatgccggtcattactaccgcatccgtaccacagggaccgaatggtccgctgattccggaaatccatgcgaatgcgccccacgcgcaatatgtcgcgcgtaaaggggaaattaatgcctgggataatgccgattttgtacaagcggtaaaagcgacaggccgtaaaacgctgatcatcgctggcactattaccagtgtctgtatggcttttccagccatcagcgccgtcgcggaagggtacaaggtatttgcggtaattgatgcctccggtacgtacagtaaaatggcacaggaaattacgatggcccgcgtggtgcaggcgggcgtagtaccaatggataccgcggcggtagcctctgagctgcaacgtacctggaatcgggaagatgccgcagaatgggcggatgtatataccaaaatattcccggcttatcagctactgattgaaagttataccaaagcgcaggaagtagtaaaaaataatgaactgctggattctcaacgcgcataaataacgccctgaagaggctaaatagccccatttaatggggctattttacttgccattttggacctgggcagtgctcgccaaaacgcgttagcgttttgaacgccgcttgcggcggcccgaagggcgagcgtagcgagtcaaacctcacgtactacgtgtacgctccggtttttgcgcgctgtccgtgtccaaactggctgcgccaataacgcctggtgggataggctcttaatcaaatacgccattaataatcgccgtgaccaccgcggtactgagcgcgatcagcaccagattatccccaacgattttccactcatagcccggataataaggtaattgtcccagcatagacgccggcaccgtttttttagcgattcccggcggtagcggttttcctctcgccagatttttcgcaatccccggaggtaaagactgataacccgtcagccctaaattcactgccagttgcctggcgacagcatagctaatgtccgactcgacgtgatccggtttaccgccatttttacggtgttccgttttttgcccggcatttcctttatgtccgttaccgttattaccctgattagccgcgttattaccatgtccgccgccattaccatttcccggattcgccagcacaggcgtagcgctcagggaaaacgtaatcaacgtcgccaggacggcggttaaaccacgacgattattcatgatattgcccttctgatgtgggataccatgaaaatagcgccccgccataaaaagaacaactacatcgattcttattttaagcggggctcgccaacagcagcttatcgtatccagatagtcagtaaaatcaggatgattgctatcaggacaacctgataaaaaattttgtccaaccctcttttttgcatggcgtcacctcgttagaaaacgatttgccagagggctaaacacaacaccaacaggctaatcagtaaaaatatcagcgcgatgattttatcgggtgagcgattcatctgggcgatcctcaaacattattaaaaccactggccaaagcgtttgatataaaagcgcttcatgccttgcgccaccagacagtagctcaataatgtcgccaccaaccacgggaagtagctcagcggcagcggctccagtccaaccatcgcgcccagaggtgagaatggaatataaatgcctatcgccataatcaagccggtcgtcaataataccggcaacgtcgcccgactttggataaacggtattttctgcgtccttagcatatgcacaaccagtgtctgcgagagcagaccctcaataaaccagccggactgaaagagcgcctgcgcctctacgttattagccgcaaagacgtaccacatcagcgcaaaggttgtgatatcgaaaatagaagacgttgggccaatccatagcataaaacgaccaatatttttcgcgtcccatttccgcggcttacgcaggaactctttatccattttgtcccacggcaacgacaactgcgaaatgtcgtacatcaaattctggatcaacagatgaatcgccagcatcggcagaaacggaataaacgcgctggctaccagtaccgaaaaaacattgccgaaattagagctggcggtcatattcagatatttaatgatattgccaaaggtttcccgccctttgataacgccttcctcaagcaccatgagatctttttccagcagaataatatctgatgactctttagcaatatcggcggcgctatcgacggaaatccccacatccgcatcacgaagcgcgggcgcgtcgttgatcccatccccaagaaaaccaacggtatgaccatttttctgtagcgcttgcaaaatacgcgttttttgtaacggcgtcagccgggcgaatactgcgcgtttctccacctcagacgccagttcggcatctgacatcgcctcaacctgggttccggtcaggatatcgtgcgtatcaatacccacttccagacagatacgcgccgtcacaaccggattatcgccggtgaggactttgaccgccacgccgttatcccgcaacgcggcaatagcttttccggcgctttctttcggcggatcgagaaaagtgagcatcccttcgatggtaagttcggtctcatcctccacacttaatgtcggattgttcccggaaccatccagcttacgtgtcgctatcagcaatacacggaatccctgcgcattgtaatcttcggttttcgccagcagtagctcgcggcgtgtttccgtcagcgccaccacacgatcgccttcgcgaagatgggtggctaccatcatcatctcttcaacggcgcctttgcagatcaggcatctgtctccatgctgcgcatcctccaccaggaccgatacccggcgacgtacaaagtcgaatggcagttcatcgcgtttaatgaagcgcgcttttgtcgatggtgcgattcgaccctcgccaaaacgcagtatggcgcgatccatcacattccgggcgccgctctggctgctactattcagccaggccagcatcaatacccggctgctttttacaccgctcacatccagatgatgctccagaaaaatattgtcctgggttaaggtgccggttttatctgtacacagcacatccatcgcgccgaagttttgaatagcgttcaggcgcttgacgatcactttgcgccgcgacatcgcaatcgcgccttttgccaggttggaactgacaatcatgggcaacatttccggcgtcaaccccaccgcaactgccagcgcgaacagcgaagcctctacccagtctcccttactgaacccattgatcagcaggacaaccggcaccatgatcagcataaagcgtatcaacagccagctcacgctgttgactccgcgatcgaaagccgtctgggtacgcgtacccacaatggatttcgccagcgagccgaaccaggtacggcttcccgtcgcaaccacgaccgcttgcgctctgccgctggttacattggttcccatcagacagatattgcccaaatctagcaggcttttatctttatcaggcaattgctcgctgtctttacctgccacatcagccataacatcgtatttttctacgggtaatgattcaccactaagaattgactgactgataaagagatcgcgcgacgccagcagtcgaacgtcggcgggcaccagatcgcctgcggccagaaaaaccacatcgcccggcaccagttcttcaatgggaatctcttcctgcaccgcgcctatattgcccggcccacgacgcaacaccgtggcggtggtgcgaaccatctttttcagcgcctgtgctgctctgttagtgcgaaactcctgccagaaacgcaataacccgctcaaactgaccatcgtcagaataatcagcacgccagtgagatcggtctcttcgccacggcgtaacgggagccagtaatccgtgatgaaactaacccctgccaatgccatcagaacgtaaataaacgggttattgaatgcctgcagaagctgaatcagcgccggaggaacttgctcatgcgccacttcattgcgcccatacactttcaaccgttcgctggcctcttctatcgtgaggccctgacgatggctgttcagccgcgccagtgtctcctccgggctatgaaaagcttccgcttcgatcggaaatacttttttatgctgcttatcattttctgacgccgggcgattgagtttccggttttcaatgttcatgtcagtcatgatgaatccccaaaattaaggtgtagtgtttcctgcatatcacgcccggggaatagtaaactcacgattagaaggtgaatgccccgggagaattatctatgcataaaaaaggttattgcttactcactattttgagtgggttttattttatcgactcgggaatatccatcattccctccttatacgcctggcgtaatgttgcaattgaataaaaaactattattgactatcaatgctccagtgaattgcggtgatattatcgttatcacctattctggatataatcagctctcgcgttttacgataatcagcatgacccacgagctcggcacgaatttctttatagccctgttcctgagcggggaccgaacctaacccttgtaaacagatcgcggcctcttttacgatattcagtaaccactgacgaaccgcgctctcatcttctttattacaggttactttcaggatataacgtttttctccctcagcggatattgggagttgatttatacgctgcgccgcttcacgcaataaaatattggcgcaaagaataatgatcgtcgccgccagcgcatttttgaactgccctaagccgcataacacgccgatgcccgccgaacaccatagcgttgccgcagtgttcagcccgcgcacattcatcccttcgcgcatgatgacgcccgcccccagaaagccaatcccagagacaatctgcgccgcaattcgcccggggctgtctggcgatgtcgtcatggagctcagaataaaaacggcggcgcctgtcgccaccagcgcattagtgcgtaatcccgccatacgttgacgccattgtctttccgcgccaatcagcgcgcccaacagcatagcggccagtaaatttaaaatataaggaaacattaacatacgttcctccattttttctggaagaataagtacgtgctatatttagcacacgacaaatttctgccctgaggcaattagcgtcgtgttaacggcggaggaaataaagcgtgtttaaacatgaacatgacgattacctcgcgacaatgcgcgtgttgtaacattattgggatgacaatcgtcacaaggggagattgctgcccaccggttcggcaagcagcgcaggaatagcgtgcgttaacttgccagatgatttacgtaaaagtgactgtccaacatattactcctgcatgaatttgcgcttattatagtcagccaatatgttccgtaaagtgcaaaggcgggtttagtgacgttctgtttaagtttgtttgatattttttcttatgacaaaaaaatgacaatattatgtcgataacaagctcgtctgaaatcattaaacaataaattcctgcttaataccggcgatagctctgttatgatgcctgcacgtaaaaaaataaaacaacatgacgaggaaaaaatgggttccaccagaaaagggatgctaaacgtcctgattgccgccgtattgtgggggagttcaggcgtttgcgcgcagtacatcatggagcaaagccgtatgtcgtcacagttcctgacgatgatacgtttgttattcgccgggctgatactggtgaccttctcctttatgcacggcgataagatattttcaattcttaaaaaccgcaaagatgccctgagtctgctgattttctccgtggtgggcgcgctcaccgttcagctaaccttcctgctcacgattgaaaaatccaatgccgccaccgcgacagtgctgcaatttttatcgccgaccattattgtagcgtggtttgcattagcgcgaagaacacgaccaggcattctggtcttaaccgccattcttacatcgcttatcggcacctttttactggtgactcacggcaatccaacatcgctgtcgatctcttcagccgcgctgttctggggtatcgcctccgcatttgccgccgccttttatacgacctggccttccaggctaatcgcccaatacggcacactgccagtggtcggctggagtatgtcctttggcggccttattctgctgcccttctacgctaaagaaggaacgcactttgcggtgagcggcagcctgattctggcctttttctacctggtggtgatcggtacatcgctgacgttcagcctgtatttgaaaggcgcgcaactgattggtggccccaaagccagcattttaagctgcgcggaaccgttaagcagcgccctgctgtcgctactgctgttggggattagttttaccttgccggactggctgggcacgctgctcattctctcgtcagtgattctgatctccctcgattcccgtcgacgcgcgcgggccgcttaacgccgttgataatcacgatgaccgggcggaagagggaaaagtttaatggcgctttgccttaatctcttcgtcagaaagcccggtaatcatcagcaccatctctcgctcgatcccctgttccagcatcgtatgcgcaatacgcaaggcttcctcctgcttaccttgatgtataccttgctgtatgccttgttgcacgccttcacgcttaccttttctgcgccccgattcacgtattctgtctacgatcgtcattaatctctccttgtgttggggaacacggcgcgccacctcgcggataaacttgccaaaacgaggcgtgctgccatgctgtattagcaaataattaaacagcgcttttagctgactgtcattagcgtttcccgtaatcagaagtaccgctaagcgctcgaccaatcccatcaggtcgcgttgacgtatatgcttttgtaccagttccagcatcgcgatacgtcgatgctgcataatctcgttatccggcaccaccgtaatgtctaccagtggaaatgccgtcgcataaagctgacgcgccagcgcaggatcgtcaaactcatccagccagcaaagcgaaaagggatacgggcttttcgcgccatggtaaaacagcatgggaatcaccagcggtaacgttttatggccagcatccagatggcgctgcatcgcggcagtggcgtaacgcattaaccggaacgccatatgcgcgtccggcgtactctgatgctctataacgacatagatataaccgtcgccttcacacgtttttagcgaccaaaggacatcggaataaaacgcgcgtaaatttttctcgataaaactgtccggcgccagtttcaacgtcgtcagatcgcaacgtattcttagcgaatggggaagatgaatattgagaaaatcccgcgcggtatccggatggcgtaaaaacgttttgaataccgcatcatgaggcgtggacgtggggctttttttcatggcgatccgtcacctgaggaataagatgacgccactgtactcgccaaaaatacagacagcattcaggaaaatttacccctgcgaggaggctcgaaagggaatcactgacggctgcaatacgtacatttttgcccagcctgctacgcattatcgcccgatagcgtaacgctaaccgggcctacaaatacacgtcatctgtaggccaggtaaacgcagcgctcttcggcgataaatctcacaccagcgctttgactatctccatcaaccgaatgatgtcttcggggcgcgtattgccggtttgcggatcgataatcgagctgtaaacatgcggcatgacgcgcggcacgcctgcttccaggcaggtttgcaggataataccgaaattatccagtgagataccgccggtcggctcgataagcgtcatgccgtggcgggcagcggttgtcgccagcgcatataattccggtaacgacttttcgccgcccatcgggaaaaacttcgccgcatgtgcgcccatatcctgcatcatgcgtaccgccgcttcacaggaaacgcgggctggcgttccctggctgctgctgacgccggtagaaatcaccacctcgccaggcgttcccgtcgggctgaccagggcgttgatatgcgtttgctcgccgcccgtcgccgccagcgcgcccgccgcgaagccgctgccggtaaaggtctggttgacatgggccgggtgagtatgggcggcaatcatcgccgctttgtagtactgcgccgggtcgcctgcgcccagacccactgagatagacggcacctccgccatccagcgtttcacctccggcacgccctcttctaccgtagcgaactgcgcggaaagtacgccaatgaccgcatggccttcggcggcttcatagatagccttcgcgttggcgatatcctttgccagcacgttaatcgctacccgctgacgataaaaattaatctgctgcatgttctgcaatctccctgagtcgcgccacaatcaatgccatttccccttcggctaccgtgcgtggatcgaggctaaaaaccccctgatgaagctgatatttgcgggcgtaaatcgctatctcgccgccgcgcagctgcgcttcgacgtcctgcgcgttcagccccaattcagatgcgttcacccgcacacgaatacgccagattgcacgcccggcctcatcctgttcgatatcggcataaagtccatggatggcggaaatcgcttccgcgaccggctgtaactgtgctgcggtcacggtcgtctggccctggtggtaattctccagcgcatacaccagcccaaccatgttttccttgccgattttcattgctctggcaatcccctggtgctgcgctttgcaggcggcaatccacgttttcctaccagtgataaagccggaggttggcgcattaaaggctttcgcgccgctatagataaccatatccgcgccgctcgccacccagccgcgcaaatcctcttccgccgcggcatcgacaatcaacggcaggtggttggcctgcgccacctgtacaaaatcgtcaatgctcaacatgcctttctgtacgcaatggtgtgatttcacatacagtagcgcggcggtcttttcgttaatggcgctttccagttgccagcgggtcgccagattgctcgaccccacttccactatgcgcccgccgccaagacgaatggcgctggtgactggcgcgccgtagtccacattatgcccgcgcagcatcactacctcattggccataccgctactgtccggcatcagggcgacgcgcgcccgatcgccgtgggtgatagcggcagcgacggcaatggcaatacccgccgaggcgcacgaggtgatatagctatcttcagcacccgtatagcgcgataccagttcgccggttttttccaccagcgcgtcaatctcgacgaaagcggaagccgcgcgcgcggtggcctgcatgacctccggcgcgacgcttgagacgcccagaatggtcattttgccgcaggcgttaatgacctttttcaaccccagttgttgatagatattcggcgtcatgatttacagcactcccaacaacgaacagactatgctcagtgcgacaatcgacagcaaaatggtggtgtagcgcggccctttttttaccagatagaagtagatggcgaataccgccgccagtggcagtaagcccggcgcgatagagtcgaggatctgctgaaccaccacttcagatcctttcaaggcgctaatttttaacggcgtggtgattttgacgtagctggcggaaagcgcgcccatcatgatcaaacccagcacgttggccccgtagatcagttctttgattcgccccccttgcagcaggccgataatcgaatcacgccccagcgtatatcccttgtggaccataccgtagctgatcgccagggtgatcgccgggtagagaatcagcgggataataccgcccatcgcgctgccatttgccgcgaacggaataaagatcgctatcaacagcggcatcaccgccgcccagataatcgagtcgcccatcccggcaagcggccccatcaggcccgttttaatgccggtgatagacgagtcgttaatcggctcgccgcgcgttttttgttcttccatggcaatagagatgccctgaatcaccgcgccgaaggtctgctcggagttaaagaagttaaggtggcgttttagcgcttctacctgctcctctttttgtgggtaaagttttttgatgatcggcgtcatcgaggcgcagaaaatcaggctttgtaagcgctcataggagctggaaacctcggcgcccagccagtagataaaccaggctttggtgatatctgctttggtcagcgccccgctttcccgcgcgcgctcaaccagttcatgttgcattacgtcactgctcatcatgctgctccttcatttttcgccaggcctttaatcaggaaggcgacacaggtgccgaagatggccatcgccatgatgtcgaccttgaggtacaacaccgcgaagaacccgccgataaaccacggcaacaggctctttttaccgatcaccataatggtgatggcaaagcccagcgccggcagaatgccgcccatgatttcaaaggagtgggttaaccagtgcggcatcagtttaaggaaactttccaccacatcctggccaaagtagttagcggcaaaaaccaccgggaagcgcagcaccagccccagcaatgccgggtaaagaaaggcgcaacgcatgatgcccgccatgtttgccgtttccgcgtgtttatccgccatatgcacccaggcagcattcagcgtgcgcctaagctgatcgagaaacacgccaatcacgccaaacgggattgccagcgcgatcgccaggtttgggtccataccggccttcaccgcgataggaatggagatacaggccgccagcgccgggtccgacggcacgttgccgcccggcgttgaggtcacgcccaaataaacgagctgcatccctgcgccgatgatcatcgcagtctgcatattgccaagcaaaagcccgacaaataccgcgatcaccaccggttgtaacagcatcgcggagaaggtgtagccgaggcgtaaacgggcaaaccagtaatacaaccccatcaggcttgcaaagagtaaggtatccatagtgttatcctatacacttcatccttcaggctgcctctttgttggctgccttcgctcaccccagtcacttactttagtaagctccaggggattcactcagttgccgccttgatgcatccagaatgattttgtgtctattaaagggttagaattttttcaggatatcgtcgagcggctgcggcttatcttccggaatggtctggaaaaatacctgaacgccacggtttttcaggtcgttaagaatgccgacgtctttttcatccagcgtaatattctgaaaaaccgccttgcggtttggcccgccgccgagaccgccaacctgaatgcgggtgacgtcaaagcccagttgtatggcgtcctgcaccgccgccagtgacggaaaaagcaccagcacgttaccgtcgccaagctgattttctttccatgcagcggcaaaactctggttgccgaagcaatccactttgatatttggcggcgccgccatcaggtagatatttttcataaacggatcggcgtccagttcatcactcacaacggctatccggttcgcctgagattgtccgacccacttcgtgacaacctgtccatgaatgagacggctgtcgatgcggcataaaacgatattggccatgatgttttccttagagtgattgttgtagctgacgtacatgggcgaccacatccaggcagctactgcgcccggcctcaactaactcgtccacgcaggcggttagcatcccttgttcgcgcctgtccagcgcctccagcagtagcgacgcattcagtccggcaatcaccgccaccggataatcggcgcttagccgcgccgcgacgttggacgttgtgccgccgacaaaatccgtcaggatcagcgagccttccggcagcgttttcaccacggcctcgacgcgttgataaaactcgcccagcgtatcgacaggcattagcgcgatttccgtcacgcctttaatttcgcccgtgaccatacgcaggctgttgcaaagcggttgtccccagccgccatgcgtcagcagcaggatgtggggcaacggttgtgtggtagtcaaaatggcctcctggcgcaattacatgaggacaccggcatatattgcccggtggcactgcgcttaccgggcctacaggacactcccggtaggccggataaggcgtttacgccgctatccggcataacgcatcatcagaagagcaaaggttgtgccagaatttgtgtcacgcgaggaagaagaaaggtctggcgaggcgcgaagccccgccagtaaaaggattaactatagagcagttcgtagatataaaaatattccgcatccgataaacggatggcgtaggcgtcttcgatcggcagaaaagcggatttgatgacactaaacgcgcgcgcgtccagattcggctgactttccaacgccatctgtaacggttttcggttaatcacaatacgctctaccatacagcagcagtggatcaggaagcgcagtgtcacctggcggcttggtttcagggaaagcgaagacgtcagatggttaaaaacgccctccatctctttcagaatacgctgcgggttaagcacggaaatatggttgatgatactctccatcgttagcgcgctgataaagcgcatggcgctgcgctccatctccagacggcgttcagcgttggacagatcgggcgttaacaggctcaacaccagttccggcccttgttcggagaaaagctcttccagcgaaataaacggaatatccggcagccccggctggaaagtgccgacaatccccgccagccgctcgctggcattcaatgcctgctgaacgcgctccagacttcgtacctcgttataatcaaggatcaccatcctggtgtcctgcgacatcagttcgccaaagctctcctccagcacctttttgattttttccgccgttcccatgccagtaatacaggagatgaccagcactttgccgccgttctcctgctgcggcgtacaaagctggcaggggatatttttactctgcaggagcgccgtcaactgtggtaagtcgctggtttcatagcttaaatccagcccgacttccagcagactggtcagcgtgatgttcggcatgagcaaaacatctatctggaataacttactgatcgtactgccgaaatggatcaatgagccgatgtccaccaacaggataagccgccgatattggcgggtttgaatcatttgggtcagcgtttccagcgtgtcatgcaccgactgttcaaacggcatgtcgatggcgctgaacagctcgcgctccagcacgcggttgacatattgcgcctgactggtggcggtggtcgcgccgtgggcgattaaaataaccccgcagtcggggctggcatcgatacgctgacgataatggcggcactctttcaggaacaggcatagccagaccacttccgtcgccggacactgaatatgcagcagttcgttgattttccgacacagcagcgtggcgttgtcatattcgtctttgcagcgatccaggatcaaactggaagagtaaagctgcgggatcaggccgcgctgcacgtagcctatcagcgccaggaagtgtttacgcagtgggttaaccagattttccggcagcgaaaagcccaacacctgctctacgcagccaatcagcagcgtcacgcgctcttcaatctggtcgccatagcgcggcggatgcgccacgctgtcacggctgtagagaccgtattcaaaaatcgagctgagtttatttttcaggatcgccagcgtctccgccggggggacgttactgttgcgcaaattaacatactcgcgcgtcaggaagctgtaaaagaggtcgctctcttcaatttccgccccggtcgccagcgacgtcttcaatgcgggcagcgtgcgcgcgtctatatttagccgcgctttaccctcaaacagagtatccaccaatagacgctgttccggcgtcgggttaaccgacatttccgccagccgcttatccagctgtagcgtgtcgttatgctcggtcattcccgatgcccacgcctgagcgcagagaaactgaatatcgcttttaagctgaccgatattgccttccaggggtttattcagcaaccagagtaacaacggtttatcaatgctgaccgtgcgttctattttgcggctttcccgctgtaagaaccccacgatcagttcgatctgttcttcaacggagcgctggtgaatgcccggcaaatcaatgcatacctgaatacgccgctggaaagtacgtaacagcgccgacccgaccggctcggtagtggcgcaaatcaggcgtaccgaaattgatcgcggctggctgctcacgccgagcggacggtactcgcctttatccagaatagagaacagcttttcctgcccttcataagacagacggtgcacctcgtccaacagcagataaccaccgtccgcctgctccacgaggcctgttttatgttcattcgcgccggtaaacgccccctgccgatgaccaaacagatgcgaggagagcagttccgggttatgggcgtattccgcgcagttaaagtagaccagcggcgggatagcgccgctcgcctgttcacaggcgaaacggtgcatcagttccgcaaaaaaggttttaccgacgccggacggcccggtaagcagaacgtgtaaaccgtgcggatagagcaccgccgcacggcctttttctaccgcatcgcgcaggctgcgatcgtaaccaatcaggctggtaaacggatcgtcgggcgcgtaatgctcttcatgcggcagcacatccgccaccgaccgcacctcgcgttcagactcttccagctgtcgtcccagcaacgtttccagcgcctggcgatgcagaaaatagaccgggcggccacggcttttgattgccaggccgtcattccataactgattgagatctttgctgacggagttacgcgccagcccaagattgaaacctatcgcctccgccgtaaacgccgtctcctgcgccaaatcggcaagacatagcccgcgcgtcagccgttccagctctcccagtacgatctcaatacgtctcattacactaccgcttacgaaataaaagagtagtcagaacatacactattctgccacgcaagaaagtgaaggcgcagcgagaaaccgccttcccacttttgcctgacttcaacgccaacggatagcacgccccgatgagtgaacgtcgcacggtctacacttactcttgaaaaagtgcaaaccgataaggataccgtttatgaaacgaaaaacgcttctgcttattgccacacttgtcgcgctaccgggcgtcacgtatgccgactctccgtttagctcactccagtcggcgcatgaaaaaaatacgattttaaaggatttgcgcaaaatgtgtacgcccaaaggcgcgctaaccgatgaagcctgggagaaaaaaatcatggcgagcgaggggaaccagcagcatattcgggaggcgatgatcgcgatagagcgcaacaatcagcataactactggcaggctctcggcaaggtggaatgcccggagatgtagcacagcttttccgctttttggtcgcgaaaatgcggactgtaaccggtttctgttcgctaaaagcgcgtattctggagcgaatttacgcgatcaaggagtacgacaatgcgataccgttttcccgataacttctggtggggcagcgcctgctcagcgttgcaaaccgaaggggatagtctgaatggcggtaaaagccagaccacgtgggatgtgtggttcgagcgccagccgggtcgttttcaccagggcgtcggtccagcggaaacctcaacgttctatcgccactggaagcaagacatcgcgctactgaaacagttaaaacataacagttttcgcacctcgctaagctgggcgcggctcattccagacggcgtaggcgaggtgaatccacaagcggtgagcttctacaatcacgtcatcgacgagctactggcgcagggcatcacgccgtttattacgctgttccattttgatatgccgatggtcatgcaggagaaaggcggctgggaaaatcgcgacgtcgtagaggcgtttggtcggtacgcgcaaacgtgttttaccttgtttggcgaccgcgtgaagcactggtttacctttaacgagccgattgtgccggtggaaggcggctatttgtacgacttccactatcccaatgtggtggattttaaacgggcggccaccgtggcgtaccataccgtgctggcgcactcgaccgccgtgcgcgcctggcgcgccgggcgctacgacggtgaaatcggcatagtactgaatctgacgccgtcctacccacgctcgcagcatcccgccgatgtgcaagccgcgcaccatgcggatctgttattcaaccgcagttttcttgacccggtattaaagggagaatacccggcggacttggtggcgctgctgaaaacctatgaccagttgcctgcctgtcagccaggcgaccgtcagcttattgccgacggcaaaatcgatttactggggattaactattatcagccgcgccgcgtgaaatgccgtgatacggcggtgaatccgcaagcgccgtttatgccggagtggttatttgactattacgacatgccggggcgcaagatgaacccttaccgcggctgggaaatttacgcgccaggaatttacgacatcatcaccaacctgcgggataattacggcaatccgcgctgttttatctccgaaaacgggatgggcgttgagaacgagcagcgttttgtgcaagcgggacagattcacgatgattaccggattgactttatttctgagcatcttaaatggctgcataaaggcattagcgagggctgtcactgtcttggctaccacatgtggacctttatcgataactggtcatggctgaacggctataaaaatcgctatggttttgtacaactggatttagccacccaaacgcgcacggtgaaaaaaagcggagaatggtttgccgccaccgcagagcataacggttttgattaagcatttattattgccggatgacgactaacgtcgtatccggcctacaaatggcagcaatatcaactcattggcgtaatacggactttcgccgccacgactaacgccgtcaacagcatcaggccgccggaaagcgccagcggcgaaagcagcccgaaattgtcgagcgcataaccgcccaccgccgcgccacaggtatttgccagttgaatcaccgcgacctggatggaaccggcttttccgcctgatcggcaagagaacgagtgatccacgttgaccatcccaccggcaccagcgcaaacgccagcccccagataatcgctattgccgccgccacggttttgtcgcttccccacacaatgagcgtcagcgcgctcagcgccagtagcagcggcgcaccggccagcgccagttttaccgaacgtttcaggacataggatgagaaagaagtgccaacgaagctggcaataccaaaacttagcaacaccagcgtcagaccatcaacgtcaaagcccgccagattcatatagaccgggcgaatataggtaaagaaagcgaactgcccggcaaaagacataaagatggcgatcatcccggccatcacgccagggcgttgcaacaggctaaacatattctgtttctggtgagaaggttcgcccggcagcgacggcagtgatttcaccacccagatgacgcacagtacgcccatcaccgcagcggcgttaaagacattacgccagccaataataccgcccaaaaagctgcccagcggcgcggcgatcactaacgcgatggagacagcgccaaaaatcaccgacagcgctttcggcacggtacgcgcgggaaccagtcgcatggtcagcgacgccgacatcgcccagaatccgcccagcgccaacccaagacaggcgcggcccagcaatagcagcgtaaagctgttggcaaaggagaccatcagacaagaagccgtcagcaaaacggcgaacagaataacgatataacgcctgtcggtcgcctgaataatctgggtaatgaacaggctggaaaacatcgcgacaaacgccgtaacggtgaccgactgaccggcgacgccctcggagatccccagatcctgcgccatcggcgtcaacagactaacgggcaaaaactcaacggtaatcaggcaggcgacacaaaacgccacggcaaaaacggctgaccagttaggcctggcaaccccatcagcgcggaatttttctgcgatattttcattcattgtggttacctgcgtcgttttagtgcggaaaatccacgcagtgtaacattacaaaatgtgatctgattaacgttttagcaactgacattgttgcgctgcattttgcgaggctggtcgagagttgagaattatcttctctcgctgcgtgtaaaaccaaaaggtaagacatagtgtatcacctggtgctatactttagattacaggatgtcaacctgatgcgaaccttcaaaaccaggtggtttaacagagaagcgaagccccacacgataaaagatgacgagttaagcgaggccatcaacgccgtactgcaaggaaaagcagataatcttggcggcggggtttataaaaaacgtctcaatcaaaatcgcgatcgcgcaatcgtgttggcaaagggaggcgaacattggttttacaccttcctgtatgccaaacaggatatggccaacattagctatcgcgaactcgcgggtttccgtgagttagcaaaacactatgcttgcctgaccgaagatcagataacggcactcattaataacaaagaactggtagaggtgcgccatgtcagcaaaaactaaattcaaaagccctgcctttgaaccgattcatagcgcggcatctggattatttagcgtggatgccattccccaggagacaatgcgcagttttgacacggcctgcttaagcagcatcaaagacctgcagccacttgaaataaaagcgttacgagaaaaactcaacgttagccagccggttttcgctcggtacctgaataccagcgtatcaacggttcaaaagtgggaaagcggcgccaagcgtcccagcgggatgtcactgaaactacttaatgttgtccaaaaacacgggctaaaggtgctggtatgagggttttaccgatggtctgttaaggctattcatacgatcatgagtgcaggaagcctctacaacttcctgcgctgtttgacgggaattgcactatactgactcaccaaagccatcagcaaatgcagattttaattcatccataaaagccagttcatcctgtccatcacaaattaaatcaatcattgtgtttccctttacgccagcccccaaaatactcatcattcctttaatgggaatttctttgtcattattaactagcgttaatgaagactggtattttttgacaattttcgcaagcgtagcggctggccgcgcatgaagccccgtactgttcataacgcgtactttttgtctaatcatatattttccttaagagactttgcggaatgctgagtgatttttattcatcatcttaattttagaataaacatcatcctcaactgcctgttttgcgttcgccatgacacgcgccagattagcctcgttgttattatttacccaagccttaccaacagtagtaataaaggctttgcgcaaatcactcgcaatattcactttggctactttgtaattaacaaagctgcgaagaatatccgcgtcaataccagaacctccatgaataaccaaaggtaccggactgacagacgcgatgcgttgtaatagcgggatatcaatgcgtgggatatcttcaagaccatgtacattaccaattgacactgccagcatgtcgcaccctgtctcctcaacaaagcgctgaaccttctcaggttcagttttgcagtcagcctcgctgacatgatcatcttccttacccagaatagcgcctaattccgcttcgacgggaacaccaaatgatttacagaaatcgacagcttctcgggtaaatgcaatattttcttcgagcggtagcgccgcgccatcaatcattactgaggtaaatccggcccggacagcctgcttaacatcttccagagttttcccatgatccagatgcaggctgacaggaatatccattttatcggcatgtcgcttaactatttcataaatgtaatcgtaacctgaaagctgtgcattagtaggagcaatttgaataaaattgggcaatccggaacgttctattgcattaagaatggaaattgttgtctccaggttcgttgtattaaatgcccccgcaaggacatgtttttcctgaatacaattgagcaggatcctaccattgactaaaggcatattaactccagatatttatgtgagcagtgtaagtaaattatcgaactattgagttatcacagttattcaccaataagcgccccttcttgccgcagtttaaattggtaaaatgacagccattgctgctgatatattttcaactttgcagaacgaaccgcgtcaggaaaatatcgctcagccacaggaacagtcggggggacaacattcggacaggctatcaacaatgctccaagggagacggtttcatcaaaagcaatggcctcaattggacactggaggatgtcagccttcaactggagccagtatgggtttttcaccgcagggccaatgacttttactgtcctgcccgccgggatattaaagcacccgtgacagtgtgcaaactccatcgccaggccaataaagacactctcaagcagagactccggaggaagtgaatccgtcagaccaaaaagcaggccacgagtgtgccgatttttatttggcgaacccgagccccgcaaatgaggaataaataccggcacatgctcgacagaccaggaaggtttgaggtactgctccatgactttttccaggcctgtgcttatttccttatcagttaaacgaaaggtttttttcacccattcaagcgcataaccgccgacaggcagagaagcgaaaagcgtgaaaaattcaccatcggagtaacaaccatttgccagcttattcctgcgagcctgcacatcaagcgttggctgtgtattcagcagtaaaataccctctgtcgtgccggtagaattcagcacatcgcccggttgcatctgtaatgcgcgggcaccgaccatatgatcgtgtccagcgagggtgacttttacctcatgagagaagcccaattcctctctaagcgttgccgtcatccatccggccacttcacctggctttatcaacggagccagtacaccgaacggtatgccgagaatcccggcagcattacgagaccaggtacggcgagcaatgtccagacacaacgttctactggccagggatatttccgtctttttcgcacctgtcattctccacaacaacacttctggtgcatgtaaccagcagatatcttttctttcatgcaaggaatagttatcaagcaaccatctcattttaaatgctgagtaattactgtgaggtggcaatcccgttatagaatacagttcttcagcctctgccttgcttaatgacgagagataagattcaccacgtcgatcataccaggccagcatcggggtaagaatgacgccctccttatccacaaagacgccagactcaccgaaactcgcaatactgatattttttaccggaaacggtactgaagccaccagttcagccattaccagtcgcagtgcctgccacagcgcttcgatatcgaaatctacctcgcctttgtccgacgatattgttggcgtcggaaacttgcggacttccagaactgacacgtcatgacaggaataacagctgactttgcagttagttgtgccaatgtcaatgacaagcgctgcgtggtaatcaggcatagaccgttccttttgtcaggcgaaaaacaccataaataatcagcgcaagcacaggaatcagcccgatagcaataatatttccgttgaatatttcaagcagccagaaacggaaggggttaccgccatcaaggaagcttgatacctgaccacttgacccctcagccattttgaaattgacatctttagccataccggtaataaatggcgcaattttggtcgcaatccacaagtcggcgacaataacaggaattgcggttatcacagcccggaaaatattgccacgacatgccagtacaatcatggaagccatgactgccaggttcgcaaggtctccgagtggcaggactttattgccaggaagaaggaatgcaataaagacagagataggtgtcagaatcagtgctgtagatataatggctgggttacctactgctaccgcgatatccagtccgataaagagatcatcacggccaggatatttggcattcaaatatttcttaatggcttcagacagaggtaataaaccttccatcaaaattcgtaccatacgcggaagaatgaacatgacaccgccaatgctgatccccagcaacaggatatgtttaaagtcatatccggcaatgatgcccaacaagacccccagaatagtacccaccatcataggctcgccgaagattcccatttttttctgaacgttttccggatcaatatgaatacggttaacgcctgggatcttgtcgataattttatcgaacagcaatccaatcggaaagaagacgacagatgacagggtcggaagtgaaataccttccagaccgaagtactttgccactaatggcgctgaccagtccgccagtttgagaaccacgatcgcggcaatagcggctgcggacaaacccaaaacaaaactccctgtgctgtagtaaaccagcgttccagccagggcaaagtgccagtagttccacatgtcgacatcaacagtacgtgtcttattcagggccagcatggcgacattaatcagcatcgtcagcggaatgacaaagggtgcgattggtgagccccaggtaattgcggccaatggtggccagcctaaatcgacaacaggaaggctaataccagttcgctcaaccattgcctgtgcagccgggcctacgttgctggtaagtatgtcaaagatggcataaattccgacaaaccctattccgacaattaacgatgagcgaagtgctttagcgggttttactttgaagaacaatgccaggaaaaaaaggaccagcggcaataaaaccgttgggccaaaccccaggacatattgcacaacggtatagagagtatgtgctatatcattcatatccgacctcttattcagatgtgaccagacctcgcgttagcgcctggataatttatctgttttttatttatgaaatcaggcttggcctttaaggattgaaactattttttcaagaactttatcttcacctactccggtaatgattggcaggccactaacaaccggaatatccagttcataaggaactttcgttgttgatacaaccaaagctgcaccatcggtattgtttggcaatgaggctacattagtttgtgaataattaacatcaagcccattatctttacaatattccattactttttctgccacagccgtggaagtagcaacacccgttgcgcaaacaaatagtatcattttactcatacttcacctctttcagatatgcgtgtgtaaattgactgataaatttcatcatcattcatgaccagtaactgctgcataaaatcctcatcctggatcacatccataatccaacccagtacgttgagctgcttattgctttcacctaaagcaagcataaacaccaccctgacaggtacgggatctggttccccgcccatatcttcgaaattgacgggttctgccagtattccaacactaatggcgttttggcgaacatacttgtgatcagtatgtggaatagcgacgcctacaggctcaaccggtagacccgttggaaaattctgttctcgcgtaatgacgtgatcggcaaaatcagatacaaccataccatcgttaattaacggactggcaagagccttgattatgtcattctgactcacctctttagggaggtgtcgaacataatgacggcgaaaatgaatatcctgcatagattcctctttgctagtcaggcatccaggcgctgtaaaatagtgccaagataatatttattaccttttaaccagacgttaccaaaatcaatggccaatcctctagagaaaaataccaactgttccaaatgcaaaacaggtgcgtcttcaccaatatcaagataatggcctcgctcattaccaattaatttggctgcgtaacggctttcagaaaaacttattttcttatcagataatctttctattgctgaaaataaattctccctggtaaaatctacatcaataataccggggcagagatcaatgttgatacgattttcaatcaacatgactttttcatcgccaatacaacgaaggcgtttaagaaataaaacatcttgtcccggtttgatactcagtttctctgctacaaagcggttagcgggttccagtcgggaggttatgacactggttgtgaagtttatcttctggctggctaaggcttcagcaaaggagagcaaaccttcacccagtgggtaagcaacattttccttctttacgaaagttcctttaccctgcacttgcacaagaacaccttcccggacaagttggtcaaccgcttttttaacggtaccgcgactcacctccagcatatccatgatttgaaactctgaaggtatccggtcatcctcaactaattctccgctataaatactttcccttatccactccacaacctgttgatacagtgggatgtgtgaacttttactcaatgttttcatggtgcgcgcctaaacatttagagttgtctatagacaatcatgtacaacttcgagtttatgataagaaattttgagacaggaggtatggcaaggagtcacagttttagtgttcaaaacaagatcacatttccgtgatatatgtcacggaaatgatgagctataagtctctgacgttttggcgtcgttagcggttattcggtgcgttacttctgtggttcacccttagcaaatacgatggcggctacgctttatttagttaacgatgaatcgcgccacccggccgttaatcgtggctcgccgcccttgccagcctcattcatctcgtcttttgttaacgagatagtgaagagtatcaatgcagccagtggacaccctcttccggctgaaaaaaggcgttatagcgcagttgaaacgcgttgatctcctgcatatcgggttccatttcgcgcaaaaagcccagcgccagccgtacctgtgtatcggtgatcggcgcggctaaacgcgctttttgcagcaaccgatgccaccgctgcaaattctgatcgccgccatcgacaatcaccatttgccagatcagtaacacctgagcggcattttgcaaatgcgactcatcagggcgatgcagatactgtaaaaattcaccgcccgccgttttacccatctgatcaatcatcgattctatcggcactacatcaatattcagacgttcgctcaggcggcgaatcgcccggcgggtatccgatgtcagcacccgaaaccccacaataaacaccaccacaaacgtggccagaatcaaccaaatcatgcgcacatccgtcaccaaacaggatgcccatcataacggtaaatttataactgtcgacgttctggcctgtcaggatgtgatttattaacgcttgtcttcatttacgccagacgccggatgtcctgtctgacgaacgcaaggcataaaaagcccggcgttaagccgggcaaaacgttaccaaatgcacacatttaagcgatattgacttgctgaatttttttctcacggcggattttgcgctcttccatcacggcgaccatcgccatcaggcagatacagccgatcgcggcagcgtccagcgcggcgaacgtgcccgcccagccggtcagaccaaaaacgggggtgccgtcggcaatcatgcccagacccagcttggcaaagctatcgccgataagataagcgaaggtgcccttgataccgtccgcagcgccgatggcttttttcggtacgaaaccgacagccgccacgccaattaatagctgcggcccaaacaccaggaaaccgagcgcgaacagcgaggccagatagacatactggttgctggcgtgctggtagacgccgagggtggcgatgattaacgccagcgccacacaggctaccagcgcacgacgaccgttcgccaggtcagagagccagccccacagcaacgtgccgaccagcgcgcccacttcaaacaaggtaaagccctgaatcgccacctctttagaaagtttcagctcctggaaggcgtagacggttgaccactggtcgataccaatacgtaccacatacaggaagatattggagaaacacagcagccagatcactttgtttttcaacacatattcaacaaagatctgccacttggtcatttcgttttcttcagtctctttatcctcttcgctgatctcttcgccgaacagttcttcagctttacccagaccgtaagattccggggagtcgctgccgaaacgcagaccgataaagccaacaatcagcgcgataatcgacgggaagataaacatgccgatgacgtgaccgtcgaacaggtagttggcgccgaacagcgccacacctgccgcgcccgcgccgccgaggttgtgggagatattccagaagccgagaaaggtgccgcgtttacgacgcggagtccatttggtgatggtcgagtagctgcacgatccgccggtactctggaagaaaccgctcagggcatagaaagcgatcatcagaaacagactggttgaccccgcgcccatgctggcgctgaagccgagcatacagatagcggagaggatcaacataaacggtagaaactgcttggtatttttaccgtcagcgtagtaggaaaccagcgttttccccacgccataggtgatcgagaagcccaggccaatcatccccagctcggtcatgctcaacccgtaggtagagatcatgtcgttctgcgcgatgttaaagtttttgcggatcaggtacatggtcaggtagccgataaaaaccaccagataggactgcatgaacggcttgaaccacattttacgccgcacatcgagcggcagatccagggtcggcttgcgcacctggtttaagaaggccagcatggattactcctgagctaatttttatacctgcgaatggcaggcattgtaaaaatccacaggaaaagtggcctgcgacagcgtccaggcaaaaccgggaaaatttcttagttttgccccattcagcgcaaaaaggtgaggtgtatcacgcttcgtgggtctcgcgtggggcctgagcgttcagaaatggcaacagcaatagcgcggagatccccgccgcgatggcgatgaccgcaaaaaaaccggtccagtgccagatctccagcactttcgctaacggccagccggaaagcgacgcgccgagataggcgaacaggccgacaaagccggtggccgcgcccgccgcctctttatgcgagcactccgccgccgccatgccaatgagcatctgcgggccgaagacaaagaaaccggtggtgaagaaacaggccgcctgcatcacgtagctggcgaacggcatcagccacagcgaacccacagagagcaaaatcccggcggcgaagattaaattcatcggtccgcggttgccgttgaagagtttgtccgagccccagcccgccaccagcgcaccgataaatccacccagctcaaacatcgatactgccgtgttggccgtgaccaaatctacgcccagcgtctcggacatatacaggttgccccagtcgttgatcgccgcgcgcaccacgtacactaagacataacacaacgaaagcagccagatatagggattcaacagcatatatttagcgaggatttctttgcgacttagccccgcgccctcttgctgttgggcgacctccagcgcatcgtgccgccagtcgcctaccggcggtaaaccaatcgcctgcggacggtcgcgcagccgccagcagaggaccatgcccaccccgatggcaagcaacccggccaccatcattccgacgcgccagccataatgcagggcgacagcggccataacgagagggatcagcgccccgccgacattgtgcgcggtattccataacgcccaccagccgccgcgctcggtacgcgagtaccaggcagtcagcaaacgggcgcaaaccggcgatccaaacccctggaaaaaggcgttcagcgcccatagcagagcaaaggcccacagcgaggtcgagaagccgaacagaatattcactacgccagtcgcaatcagcccgatgcccataaaatagcgagcgttagagcgatcgctaacgatgccggagacaaatttcgacaccccgtaggtgatgtaaaacagcgtcgccagcaggccgatatcgctgcgggtcagaatgccgctggcaaggatttccggcgcggcggcgttaaagcttttacgggtgaaatagaacagcgcgtaacccaaccaaatggtgatcaggatatgccgccgccagtagcgatagcgggcgtcaacctcgtgcttatcggtgatgagcggcgcgttggccggggcttttaaaaacgaaagcattatccttccttaaacgtaacgctggggcaacgagacgctcacccgcgtaccgtgggtacaagagatggttagcgtcccgccgagcgccgacacgcgttcgcgcattccggtcaggccgaagccctgctggtgagagcccggcggcaggccgctgccgtcatcctcaatcaccagcatcagccgctcatcctgctgccagccctggagcgtcaccgcgctggcattggcatgttttacgatgttattcagcccttcctgacagacgcgaaacagcgtcacgcgctgactttcactcagcgccgtttcgtcaattcgccagtcgaggtgactgacaataccgcggctttccagctccatttcgcgcagcagcgaacggatggcctgcgccagcgttaagtcgtctaactggcgcgggcgcaagcgccccagcaggcgacgcaccgcgtcatacacgcccagcgaaagctgctcgataagttgcccgctctgcttcacgccgccgttatccgccgccagtcgttgcacaatgcccgcctgggtacgaatcgcggtgatggtctgcccgatgtcatcgtgcagctcacgcgcaacatcgcgccgcacgctctcttcggtctccagaagacgctccgccagccgatggttgcgcgccagctccttttgcaacgactggttcagctcgcgcagacgctgaatgcccgcgccaagcagtagcccggtcaggctttgcgccaacagcgaaagtaataaatcgacgggatgatcgtgccaggtctggctggcgatcagcgcgatagcgttcatcagtgtggcaatgagcgcgccctgccagccataatgccaggcgagcgcgataatcggcaacgccaggcagaacggcgtaaagcgcgaaagttcagcaggtaaacccagttgcagccacagactgacgataaacagcagcagataccagatcagatgccgcccgcgccagtttaccggctgcgataccagcgatggtcccagcggcagccaggtagtgctggtgagatagtgccagaaaaccaggcagatgggggccagcgtcagaccacccgtgagggtcagcagtagcgcgttccatgcctcttccccctgccccagccagggcagggattgcagtagcgccgcggcggtgagggccgcgccctgaagcaataacgtgcgccagtcgcgctgatggcggtaacgcgaagtcagcgccacgggcagtagcgtcaacacactaccgatcatcaaaagcggcagatgggccaacgcaacttcctgcgccaaccagtacaccagcagccactccgcgcccagcaatactggccagtatccgcgcgggcattgcagcataagtcccaggcgcaggccgaagggaaagagtagcgccgccagctccgggcgctctaccagatgcaggctgatactccacaggcagaaccacgcggcggagaagataaaaaagcaggcaacaacggtgattaaacgggaaaaaaaggtgttcattaccaaccgtcaaacatgcgatgcgccagttcaacgtcattgctgacgcctaatttttccagcagattcgcgcgatggacatgcaccgtttttggcgacagccccagctcggcggcaatctcttttaccgccataccctgggcgagtttttccgccacctgacgctcgcgtttggtcagcggatcttgccgacccgccgccagtttcacggcaatatcgggggtcaaatagcagccgcccgtcgccaccgtatgcaccgcggcgatcagttcatccggactacagcgtttagagagaaaaccgcgcgcgccggcgttcaacgcctgttccaccagcgccgggctatcgtgaaccgagagcacgatcgtcgccatcccttttggcagttggcttagcagctccagtccggaaatatccggcattgagatatcgcagatacatacctgtacgccgcgccccggtaagcctgccaacgcttcgcgcccggaaccaaattcggcgaccacctgcaaatcaggttccagccccagtagctgtgcaaagccggagcggacgataaggtggtcgtcgataagggcaacggtgatcatgggttctgtcctgatggataaaaaaaacgcgcttaccttaacgataagcgcgcggctgttcaagccttgagcggtcagacaatgcctgtcgtgacggtgaacgtccgggtttgctgcggttccagttgaagcaaggttccatttcgctgcgccgcgagaaaaccttcaggccgacaggtcgcgggcagggcaaaggcggcaacctgctgatcgccgttataaagaatccagcgggtcatgtaatttagctccgcgctggcgaaacgtgtcacgaacgtggtgccatccggggcgatcatactgaattccggggtatccgtgtacttgtccagttcatcggcgaagaacacgatttccgggtcgtaaaagtcaggctcgttgagcgttgccagcgaggcttcaccctgcaaaagtcgttgattaaacgccagccactgcgccgtgggtttgacatgcgccggcaccgactcgcgtagcttcagcgcggtatccgggatattctgacggaacgtggcgttcggcacataggcatagttcatgtggcacatgtactgtagcggcatggcgactgaagccaggttagtcactgtcatctgaatatcaaacagcgcgcttgttttacgcattaccaccgcaggttgcgcctgataatgatgaccgaaccccatcacatactcgtagcgcccggtcacgcgcagactgtcgccctctaactccagccaggcgtcgtccatggcagcgcagggcatctcgccgtgcagcggatgtgtatcttctggtgacgggcagccattcgccaatagtccggaatggaaagcaaagcaaccatacgttgccaccacttccgcagccggcttcggctggcggaacatgttgcgcatagtcagatcatgaccgtcaaactgcgcgtcccaaatcatctgccccatccagggcagaatcaccagatgaccgcggctgttttgtattttcagtccttccacgccgctggcgtaacgaaacgccgtaaccgtaaaatcatcattttccagcaagatacgcggctgctcgctaaaaagctcccgccataatgtaatacgtgttgtcatggttgatctcctcaggacgcggcgacttcagccaggttgccgcgcactttgctttcgcgccagaagtaaacgccaacgtaaacaaagcacagcatggaaaccaggaatgagagctgtagcgagtggaacatgtccgccacgtagccctgaatcgcgggaaccaccgccgcgccgacaatcgccatcacgatcaccgcccccgccatttcggtatgctcgttatcgacggtatcgagcgttccggcataaatggtcgcccagcaggggccaaacagaacactgaccagcaccgccacgtataccgcgctaaagctgggcgccagcgccacataggccaggaacagcgcgccgatcacagagtaaaggatcaggactttttccgggttaaagcgtgtcatcagaatgttggcgataaacttgccgataaaaaagcaggcgaagctgtagaccataaaggttgaggcatcgcgctcattgatatcgcctaactccagcgccagacggatagtgaacgaccagaccgccacctgcattcccacatacaggaactgcgccacaataccgcgacggaaacgggcgttgctggcgagatagcgtaacgtatccagcgccgaggggcgtttatgactcgcggtttgcgcgactttacaggtcgggaaacgcgtcagcaggaacagtaccatcaccactaccagaaccataatcatgtacttatagggttccagagtgttttccagcatcagcaccttgaagttgtggacctgctcggcattcatgcccgccatctgtttttccaggctttccccttcggaaaagaccagatatttacccaataaaatgcctgccgccgcgccgatcggataaaaggtctggctgatattcagccgcagcgtggcgtaggctttcggcccgatcatcgaactgtaggtattcgccgccgtttccaggaaactcaggccaatcgcaatggcgaaaatcgccgcgaggaacatggtgtaggtcgccatgtgcgacgccgggaaaaagagcgtacagccgacaatgtatagcgtcaggccgataagtatcgccactttataactggtttttttaatgaccagcgaggccggaatagcaattaaaaaataaccgccataaaaggcgctttgtactaatgccgaagcaaagttgctcagcgaaaatacacttttaaattgcgtaatcagaatatcatttaacgcggctgcgcatccccataatgggaataaacaggataacaaaataaactggaacagaggtgtcttattcagatacccgtcgggcatctgaacgatgtttttatcgttcatagtgctacctttaacagtgcagggtgattgttattcgttcaacgaaagatactcattaaattgctcaatacttggataagaggattgggtgcctttcccggtgacgctgaaagcggcaaagagaacggcttttttcatggcggcttccacatccccgctctggacgtagtaatgcgcgaaacagccgataaaggcatcgcccgcgccgctggtatcgacagcgttcactcgaaacgccggaacatggacttcctggtcacgcgtcatccacagcgcgcctttctcacccatggtgacaataatattgttcagccctttatctaccagcgaacgtgccgctgcgcgaatatggtcataggtatccactggcataccggttaatatttccagctcggtttcattgggtacaaagaaatcgcatttacaggcataagacatatctaattcccgtaatgctggcgcagggtttaataacacttcaatcccgtgtttcttgccaaattctattgcgtgataaaccgtttcaagctgaacttccagttgcagaacaataagctggcatttttttaaatcttccgccgcgcgatcgatatcttccggcgagagaaacttgttagcgcctttgatgatcagaatgctgttgctggagttggcgttgacgaaaatcggcgctacgccgctgctggtacacggtactttttctacatacgtcgtattgatcccccaggattcgagattacgaatggtgttgtcggcaaaaatatcgtcgcccactttggtcaacatcaatacttttgaattgagcttagcggccgccacggcctggttcgccccttttccgccgcagccgattttaaacgccggcgcttccagagtttccccttctttgggcatctggttggtgtaggtgataaggtccaccatgttagagccaataaccgcgatatccattttactccctctcagaaatcgtcacacgacaatgatattaaaataacattatcatgttacttccgtatcatttgtgactatgatcgcgattagaggatcattttgccatttacttcgtgaacaatccctggcggaacatacgcgcaccaaatcatttttattgttacaatttactgaaaattaactatttattgttataaaacgcgaataaacccacttttatttcctgacagccggacgtatagtagtgccacactgtaatgttctcagaaacacataaatgttactgatggaacataacaacatgatttgcggagagggtgaatggagaccaagcaaaaagaacgtatccgacgcttgatggagttactgaaaaagaccgatcgaatccatctgaaagacgccgcgcggatgctggaagtttcggtgatgaccattcgccgcgatctcagccaggatgatgaccctttaccgctgacgctgctcggcggctatatcgtcatggtaaataagcctgcgtcttcaaccaatatgccgctgccggcgaaaaagacgcatcatcgggacgaccttcccgttgcgatcctggccgccggcctggtgcgtgaaaacgatctggttttttttgataacggtccggaaatgccattagttatcagcatgataccggatgatattacctttaccgggatttgctactcgcatcgggtatttatcgcgctgaatgaaaagcctaatgccacggcgattctgtgcggcggcacctatcgggccaagagcgatgccttttatgatgccaataatccttcggcgctggattcgctcaatccgcgcaaagtgtttatttccgccagcggcgtacatgaacattttggcgtgagctggtttaacccggatgatcttgccgccaaacgtaaagcgatggaacgcggtctgcgcaaaattttgctggcgcgtcacgccctgtttgatgaggtcgcgcctgccagcattggtccgctttctgcctttgatgtcctgattagcgatcgcccattaccgacagattatgccgttcactgtcggaatggttccgtcaaagtcatcacgcctgattcggaaagtgaataacttactcaaaaaagacggcaattttattgaacatggtgggatcggactggtttcgtaccaccttcgccacgtcttccagtttatcgatctgactgatcatctgttcaagtcgctgatcgtcattgaccagaagccagatgcggctctgatcgctaccctgaatcggtaaacagagaataccctcaacgttgaaagcgcgtcgggcgaacagcccgcagacgtgggtcatcacgccaggatggttgcgaacggtcagctccagaataacgttatcatgtgattgtttctgcatggcttattcccccaccatctctgtatttgccgcgcccggcggcaccatcggatacactttttcttctgcatcaatgcgcacatggatcaacgccggtccaggacgacgaatgatagcctgcaacgccgcctgcggatcggcttcgttattcaaatcacaggtgtccagaccaaacccggcggcaatctgcataaagttgatgcttcccggataggtcgccgcaaaaacgccctgtttatagaacagactctgttgctgatgtaccagtcccagcgcgtcgttattcatcaggatgattttcacatccaactggttttcactggcggtagccatctcctgaatattcatcatcaaactaccgtcgccggaaaaacacagcaccttgttgcccggattcgccagcgccgcgccaatcgccgcgggcagaccaaaccccatggtgcccagcccgccggaagtcagccactgacgcggacggttgagcggataagcctgcgcggtccacatctgatgctgacctacgtcagtggtaataatcgcgttgtcgtccacacaggcggcgaccgcgttaatcagcccatagtgactaagcgggttattttcctggggaatactgcaagggaattcttgctgcaagtccgccaccaactgatgccatgcttcccgcggctgtgcctcgatatggggaattaactgtgccagtacatcatcgacatccgcctgaatagccacatgcggctgcttaattttgcctaactcggcgcgatcgatatccacatggatgattttggcgttcggacaaaactgctccgttttgccaatcgcccggtcatcaaaacgcgcgcccagaacaatcagtaaatcggcctcttgcagaataaaattggtactgcgcgcgccgtgcatccccagcattcctaacgacagcggatgcgccttaggcagcattcccagcgccattaaggtcattgtcgtcggcagttgcgctttttccgccagttcgcgcacgcgtgtcggcgcattgatcacgccgccgcccagatacagcaccggacgcttcgccgcgttaatcattgcggcggcctcgcggatactctccgcgctaaactccggcgggggtgatttttccgccggcgacggcaacgcatccagctcaattgtcgccgtctgcacatctttaggaacgtctatccacaccgggccgggacgccccgactgcgccagacgaaaagcatcgctcatcacctgaggcaactcattgatatttctgaccagatagttgtgcttggtgatggggatagagataccgtaggtatccacttcctgaaacgcgtcagtaccgatcatggacgccggaacctgcccggtaatacagattaacggaatagaatccaggcgcgcatcggcaatggccgtgaccagattggtcgcgcccggcccgctacaggccatacaaacagcaggtttaccctccgtccgcgccatcccctgcgcaataaaccccgcgccttgttcgtggcgcgccagaatatgacggatttgcgtactttggcttaacgcgtcgtaaacggggaggatcgaaccgccgggaatgccggtgacgatacgaatcccctggcgctccagaaaatgaacaataaattccgcgcccgtaaagcgctgaggtgtagatgttgtgcccgaacttgccatgctccattccttttattctgagccgacgttccgggaaggtgtcttaaacaaaaaaccccgcccggtttgcgccggcggggttttggaatcgtgtgtgttccggaccctacggcgcattgccgacgaccaccaccacacgcacgacgaccactgcgcgagatggcgcagttgttagtagggtcgcgttcagcatggaagggttcattaggggccttgtctgtttgttattaacacgttttatacaagcacagcgctttcagcatgacaacggaaaaattttcatctgcacaaaaatgcgtcagcgatcacatttttctacgaatttacacgctttgagtataggcgtgataagcgtagcgccctccggtaatcgccgggattgatgatcacgcatttcacaatgccggaaaacaaaaaacctcgccgaagcgaggttcttacagcgtaatgcgggtggtagccgcgaagcacactgtgttatgtcaacagcagaagtatacgcgttctgtgcagaacgcgcaatttcggcgcgaattttgatgaatttgagtatggatcagaagctccgttctgtctataaattactgttcatttatacagtacttaactataatgtctttgacacaatgtgttatgcgggggccgcatcgtaaaccggcgcaacgaagtcctggctgaaacgggtggtgccgtcagcgccttaaccccctcgtgagcacactgtgttatgtcaacacgcacactattcctcgcaaaagggatcgcgtgcgcaacagctggcaacaggcagcggaaaggtacgtcggctggcagtgctccttaaccacaggagacgcgtatgagcgtagtggatatcaccattcttatcctgaaactcattgttgcagcactgcaactgcttgatgctgttctgaaataccttaagtaattcagattcaagccgcaccgaaggggagcgggcaaccgctcccctttcaccttatccgctggtctttcgcttcccgggtatgttacgtttttatgacaccctcaacgacgcctgacgctatgaccctttccgttttctgcattttgctgttcgccgcgctgttacatgcccagctggaacgccattgtcaaagcgggaaacgataagctctacgccgcgatcggcgtcagcggttccgcggcggtcatggcattgatccttttgcccttctcgccgcagccagcccacgccagtatcccttttttagcggcctctaccgcgctccaggtggtgtataccgtcctggtggcgaaaacctatcaggtctcggacatgagccagacctatcctcttatgcgcggcaccgcgccgctgctggtggcgctcattagcgttctgtttcttggcgacagcctgtcgtcgctggcctgggtcggcatcgcagtgatctgcatggcgatacttgggatggcctgtaatggccgcgccagctctcaacgtggtgtcgtgctggcattaactaacgcctgttttattgccggatatacgctggtggacgggaccggcgtaagactctccgaaacggcgctaggctatacgctatggtcattttttctcaacggcgcctgcctgttaacctgggcgatgattgcgcggcggcgggaagcgtcgcgttatctggcgcaacagtggaaaaaaggcatttttggcgggattggcactatgggatcttatgggctggcgctatgggccatgacccaggcgccgctggcggtggtcgccgcgctgcgtgagacgtcgattttattcggcgcgctgatagcctggctgttgcttaaagagaaagtggccgggctacgtctggtggcggctggcgggattgccctcggggcgattttactccgtctgtcatgatcgcccaatgacagccgcagacgtaacacattctcggcaacatttgttgccgcttttgtttacatatcctgccgttccttcgtctgccattgctggttgctgtctggccttctttttctggtgtgatagattcctctcgcatttatgggaatgcgcagcaagttattcttattttttctttttttgaaaagtaatcagcgaaatgaaaaggcagagaaacgtcaatttgttgttgatgttggtgttactggtggccgtagggcagatggcgcaaaccatttatattcccgccatcgccgatatggcacaagcgctaaacgtccgggaaggcgccgtccagagcgtaatggctgcttacctcctgacctacggcgtctcgcaactgttttacggcccgctttccgaccgggttgggcgccgccccgtaatcctcgtcggcatgtctatttttatggtagcgaccctgttcgccatgaccacgcatagtttgacggtgttgattgccgccagcgccatgcaagggatgggaaccggcgttggcggagtaatggcgagaacgctcccgcgcgatctgtatgaaggaacgcaacttcgtcacgccaatagcctgttaaatatggggattctggtcagcccgctgttagcgccgctgattggcagcctgctggataccctgtggaactggcgcgcgtgttacgctttcctgctggtgctttgcgctggcgtcaccttcagcatggcgcgctggatgccggaaacccgccccgccggcgcgccgcgcacacggctgatcgccagctataaaacgctgtttggtaacggcgcatttaactgttacctgctgatgctaatcggcgggctggctggcattgcggtctttgaagcctgttccggcgtgctgatgggggcagtattaggtctcagcagtatggtggtaagcattctgtttattctgccgattccggcggcgttcttcggcgcctggtttgccggacgcccgaataaacgcttctcaaccctgatgtggcagtcagttatttgctgtctgctggcaggccttatgatgtggattcccggctggtttggcgtgatgaacgtctggacgctactcatccccgctgcgctgtttttcttcggcgccgggatgttatttccactggccaccagcggcgcgatggagccgtttccgttcctcgcaggcaccgctggcgcgctggtcggcgggctgcaaaatattggttccggcgtactggcgtggctttcggcaatgctgccgcaaaccggtcagggcagtctgggattgctgatgacccttatgggattgctgatcctggcgtgctggctgccgctggcgtcacggatatcgcatcaggggcagacggtttaacgtttccctcgcccggcgttttgccgggcgtttcacattccggcgcgatcatcgcattgagcagggactcctgcgccggacgccacgctccttcttcgccgtcataaaactgagtgtccgcgtttatcgcatacggaatatgcgcttttttcagctcgcaggccataaaacgggcaaacgcgaactgtgaagcgaccggcgtcatttttatcgactctcccggcgcccatccgcccacccagcttgcatggccggtcttatgctgccagcgaaccgcagcgttgatccgtgcccgaatcgccgctttttccgccgccgtgcctgacgtccacggatatttaccgccgcttttcaggggtccccacgggaagatgtgccactccgccagtacatagttctggctttgcgccggcagtttaagcgccgacaaatcctccggcgcggcgcgcatgcggggggcaacgaaaatcatccgctgtgggtcaatggcgtgaatcaggcggatggttttgtcatatacgcgattcagcgacgccatattatgattaagtttgtcggcaggctcataaatgagatcgaaccccagaagcggggatgtctgaccaaaatagcgcgcgaccacgctccaccagttgatcagctccttttcatggctggcgctgggatcggttttatacgcatccgcctgataggcaataatgggtatgacgccatagtattcgcaggcctctaccagcttacgcaaatggatgaggcgcgcttccgtcggcgcgcctgccacacgaatacggacatgcgttaacccttttgccttaaaatcccgcacgaccagcggatcaaactcgcggataccccgttccgttcgcgcccagtcaacatccatcccaacgccaagctgctgcgcatagcgcgccgccgtcaaaggcatcggtttcgcatagacgaccgcgctggtcagcatgagagaggcaataagcggtttaaacacgacgccccctaaaatttttaccacggtgatagcacgtatttagcatattcactcccggcaggtgtagcgacaaagcgtaataaatcttcacacctgttcctgcaaccagcgaataaatgcctcgattttcggccactgcctgccaggcagagtggtgacataataatgctgatgacatttcagcctcatgtcaccaaaaggcgcaatcagttcaccgctgtcgagacgcttttgcaccagccgtttacgccccatcgccacgccaatgtggttcatcgcggcaatcaccgctaaatcagaacgatcgaagccaatgccggatgaatccggcaaatttactgcaaaatgctgcgcccaactgtgccactcatcggtgcccgaatcgttactccacgcctgtctgtcgtgtaagagcgtacagtgccgtaggttattcaggttatcctgcaaggcgaaacgacgggcataatccgggctgcaaacgggcaaaatcgcctcatccattaaaaaatggtgcgtgagctgcgccgacggcgcatcgtcaaaatagatagccaggtcaatgccggcacgctgtaggttaacgttatcgttgccggtcagcatagtgagagaaattgacggatagcgacgggtaaagtcccccagcgcaggcaccagccagcactgggcgatagagggacgtgaatacacggtcagcgtgccggacagttcctgatttttgatatcgaggatttcctgattcaacgtatccagcgacgatttcagcgcccagaatacccgtttgccttcatgggtaagctccactttacggtgagagcggacaaatagctggattcccaactcggcttccagttgattgatacgatggcttaccgcactggggcttaacgacagctcatctgccgccagagcaaaggactggtgtctggccgcgacttcaaaagtatagagtttggataactgccagccgttgagtaagcggtttcgggtatcgcgaaggggttccatggcaacctcagtcatcttttaatttcccgaagtgtaaaaaaacgcgctgaaaaaatccgcacatagatgaagtaaaatgaaccatatcgcaaaataaaggcaatattagatggaaatcacatagttgattcaatttacatcatgtgaatggcaaattatatcgtttgtcagggtgtgctgtttttctgtccaataagaacagattaatcacagggtaggtgagatatgcacgctcaaatctgggtagtgagcacgctgctgatcagcatcgtgttaatcgtattgaccatcgtgaagtttaaattccaccccttcctggcgttactgctcgccagtttctttgtcggcgcgatgatgggcatggggccgctggagatggtcacggcgatagaaaacggaataggcggtacgctcggttttctggccgccgttatcggtcttggcaccatcctcggcaaaatgatggaggtttccggcgcggcggaacgcatcgggcttacgctccagcgctgccgctggctctctgctgacgtgatcatggtactggtggggctgatttgcggtatcacgttgttcgtggaagtgggcgtcgtgttgctcatcccactggcgttttctatcgctaaaaagacccatacctcgctgctgaagctggccattccgctgtgtaccgcgctgatggccgtccattgcgtggtaccgccgcatccggctgcgctgtttgtcgcaaataaactgggggcggatatcggctcggtgattgtctacggtctactggtcgggctgatggcatcattggtcggcggtccgctgttcttaaagtttctgggtaatcgtctgccgttcaagcccgtaccgacagagtttgcggatcttgaagtgcgcgccgaaaacaccctgccgtcgctgggcgcaacgctgtttaccgttctgctgccgattggcctgatgctggtgaaaaccgtcgctgaactgaatatggcgaaagacggcacgttgtatacgctgctggagtttatcggtaatccgatcaccgcaatgtttatcgctgtctttgtggcgtattacatactcggtctgcgccagcatatgggtatgggcacactacttacccacaccgaaaacggctttggcgccattgcgaacatcctgctgattatcggcgcgggcggcgcgttcaacgccattctcaaaagtagcgggctggcggacacgctggcggtgatcctctcaaatatgcatatgcacccgattctgctggcatggctggtagcgctgattctgcacgcggcggtcggatctgcgacggtggcgatgatgggcgccaccgcgattgttgcgcccatgctgccgctctatcctgacgtcagcccggagatcattgcgattgccattggttccggcgccattggctgcacgatcgtgaccgattccctgttctggctggtcaagcagtattgcggcgctacgctgaatgaaacgtttaaatactatacgacggccacgtttatcgcatctgtcgttgcactggctggcacattcctgctttcctttatcatctgatcgtaaagagacgtactatggaaaacatacaaaagctcatcgcccggtatcctttggtcgaggatctggtcgccctcaaagaaaccacctggtttaacccgggcgccacctctcttgcacaaggtctaccgtatgtcggcctgacggagcaggacgtaaacgccgcccatgaccgtctggcgcgctttgcgccgtatctggcgaaagcgtttccgcaaaccgccgccgctggcggcatgatcgaatctgacgtggtcgctattccggccatgcaaaaacggctggaaaaagagtatgggcaaacgatcaacggtgaaatgctgttaaaaaaagacagtcacctggcaatctctggttccattaaagcgcgcggcggcatctacgaggtgctaacgcacgcggaaaaactggcgctggaggcgggtctgttaaccaccgacgatgactatagcgtgttgctttcgccggaatttaaacaattcttcagccagtacagtatcgccgtcggttcaaccggcaatctggggctatcgatcggtatcatgagcgcctgcatcggttttaaagtgacggtacatatgtctgccgacgcccgcgcctggaaaaaagcgaagctgcgtagccacggcgtgacggtcgtagaatacgaagatgattacggcgtggcggttgagcagggccgtaaagcagcgcaatccgatccaaactgtttctttatcgacgacgaaaactctcgcacgctatttctgggctatgcggtagcgggccagcgcctgaaagcgcaattcgcgcaacagggacgcgtcgttgacgccagtcacccactgtttgtttatctgccgtgcggcgttggcggcggccctggcggcgtcgcctttggcctgaaactggcgtttggcgacaacgtccactgtttctttgccgaaccgacccattccccctgcatgttactcggcgtttataccggtctgcacgatgccatctcagttcaagatatcggtattgataacctgacggcggctgacggcctggcggtaggtcgcgcttcgggttttgttggtcgggcaatggagcgtctgcttgacggcctctataccttagacgatcaaacaatgtatgacatgctgggctggctggcgcaggaggaaggaattcgactggagccatcagctctggcggggatggccgggccacagcgcatttgcgcctccgtcgcgtatcagcaaaggcatggattcagtcagacgcagctcggcaacgcgacgcatctggtatgggcaaccgggggcggcatggtgccggaagatgaaatggaacaatacctggcaaaaggacgctaatactcactcagtgccggaaagacggcagcgccatccggcacgccatcgcctgatggcgctacgcttatcaggcctgtgacgttaacgcagcatcgccatcaactcctccggcgagcgatgctgcttcagtaaatcccgcatcacccgcatatgcggcgaggagtagttaaaaaaggtctggtagccctcgcaaagctgatttttcccctggctatcccgatgctcagggcatccgccgccgcaaaatcgtaataaagagcacttctgacattcagcgcttagcggcaccttgtccggcgcttcagcgccattcctgccgccgcaccactgctgtagcgtctcatcaaaaaggcgaaccgagatacgctgaatatcttcacgtacccaaatatcaaatacgctatttaaaaaccgcccccagtctgctgaacacaatgaatcctcggtcaacattccgttccggtcatgttccaacaatgggataaaatggacattgcgaatgccgagccgttgtaagttacggtacagttgctgagggcgctggctattctggcgatttacgacgacctgaatctggtcatcactcacgacaatgtcctgacgtcctgtcatataaaattcccgataaatgcaataagttggcgaatatgggtaacagcaaacaggattgcgagcgacaacaccgcgagggagatcaaaaatttgtcacgcacgacatgagtttcggaaaaatcgctatgcgcgacatccatcaaattacgactcagggtataacgccaaagaatcaccgccactatcgccagaacgctgattgacacccagaacaagaaccccgcctgatgccagtggtgcctgacggctaacgccattaacgccccgtatcccagcagcgtgcgaaaccaggccagcgacgtacgctccggttgcagtcccggatcgttctgccgacgggctttacgactatccggcatacagtaccagccccatcactatcaccgcgacaatcatcaaaataacgctgatgatcaacaggctatgggtatagggcaaatcctctttcaggcgcatcgctttttcattacgtaaccagcgtagatagccataaatcgccaggccgcccgcaaacagacacaacaatagcgccagcagttcacggatcaccggcgtggcaaaatccggggcgagctgatcaagaccgacgcctgccgccagaaatcccagcgaggtgcgaatccacgccagaaaggtgcgctcatttgccagtgagaagcgataatccggcgcttctccgaggcgggaaatcttcatgacgactccttttacgttcttatgtattcccgttcgttttcagaataccactcacgttgttgctgatatgcttcacattatcccgcagcaagggaatcttattgcaaaataactgtagttcactggtgatgcgttttggcgcaaccgcgctcattgccgctatttttcatttcagttacgacctttttcaacgccaccgccaggaaaggcattattgccgaattaaaagctgaaaaaccacccgtcgcgacgaaaaaaaaggcgaagaagattgataactaactgaaaaaaattggaattatgctcgttggcattacgctgattagcgcgttcattgaggaaagagataagaagaagagcagaagtgtggccggtgcggcgcgcgttatccagcctggatttaacacagtgcgtaggccggataagcaacgcgccatcaggcgctaacccattccccaaaaaatcaccgccagcagttgtggcgtgataatacgcaggaacatcactaacggatagacggtcgcgtaagagagcgccgccgcgccgctggtggcatgaagattgttggcaaatgccagcgctggcggatcggtcatcgaaccggccagcatcccgcacagcgtcagatagttcattttggcaaaaatccgcgccagcaaaccgacggtaatcagcggaatagcggtgatgaaaataccatagccaatccagcttaatccttcgccctgcgtcagcgtatcgacaaaatcgccgccggatttcagcccaacgaccgccagaaacaaaacgatgcctaactcacgcagcgcgaggttggcgctcggcggcataaaccagtacagcttaccgatgctgccgatacgccccaaaattagcgccatgatcagcggcccgccggccagccccagttttaacgcgaccgggaatcccggcacaaacaacgggattgacccaagcagaacccctaatccgatgccgataaacaccggcagcatctgcacctgctggagtttttgctgcgcgttgccgaccacattggctaccgcatcaatcgaggctggacgccccaccagattgagaatgtcgccaaactgcaggctagcgtcactactggcgaccagctcaacgcccgcgcggttaaggcgggagataaccacgtcataacgctctttaaagtgcaaatcgcggatacgtttgccgagcactttttcgttggtgacgaccacacgctcgacgcgtaaatccgtgccacgcgtcgacaacgaggtgtccacttccttgccgatcaccagttgcgcgttatgcaggtcggtagattggccgacgaggtgcagcaggtcgcctgcctggataatcgtccccggcgacggcaccatcagcgtgtcgtcgcgtttcaggcgtgagcaaatgattttatcgctgttcaggatcggcacatcctggatagccatattattgaggttcggattctcgacacggatattcattgtctgaattaatgaatggccgttagcgagagaggattcgtgcttctgcgcctccgcctcgacgttaacgcgaaaaatcagccgcatcagccacatggtgagcaaaataccgcagatgccaaacggatacgccatcgcatagctcatccccatctgatccaccagatccactggcgttcccagatcgcgcaggatttgctgacccgcccctaacgcaggcgtattggtgactgcgccggagaaaatccccagcaccaccggcagcggaatagcgaaaattttatgcagaatcgcggtgaccaacccgcccataatcacaatcagaacagcaaacagattgagacgcagcccggaaacgcgcagcgaggcgaaaaaccccggccccacctgtatgccgatggtataaacaaaaaggatcaggccgaattcctggataaagtgcagcatatcgccactcagcgtcaccccagcctgatcgacgaagtggccgacgataataccgccgaacagaacgccgccaataccaaagccgacaccgcgcactttaatgttgccgatccataaaccgacaaccgccaccaacgccagaacgctgaccgtcaatgcgatatcactcatcttttcttccctgtgagtaacatttcaatttatagggattatgactgaaccgttaaggcatatatacagcatggcgcacattctcatgttagaaaaccgcccagacgtcctgacttcggcagcgtcttaccctttttcgtggcataaaaaaagccccgccatctctggcggggcaaggcaaggagctcattagctatttaatgcggagcgttcgttaatggcgatacgctgcggcgcaatggtttccggctcgttgcgggttaaatcaatatgcagcaggccgttggtaaacgtcgcgccggaaacttccatattctcagccagcgtaaagctcaggctaaaaggctgcatgaccaggccctgatgtaaccatttgggctcgttttccggctgttccggcgtacctttcaccgtcaggcgcgtgccttccagttgaatatccagatcttcctgacggaaaccggctaacgctaaggtaatgcgataatggttatcgtcgcttttttcgatgttatagggcgggaagctctggctttcgccgctgttttgcagcgcattggccagcttgtcaaaaccgatccattgacgcagcagtggggataaatcgtagttacgcataatcatttctccttctaagaagcgagtttttaccttcacactttacgtgcgaatatgctccctgacggcgagcatgggatgacaggccgcgcaacgcgacccgacggaatcagttaatttcgatacggcgcggtttgttcgcttccggaatcacgcgctccagttcgatatacagcagcccgttgaccaggtttgcgccgcgaacgtgaatgttctccgctaactggaacttacgttcaaagttacgctcggcaatgccctgatacaggtaagtacgttctttctgctcgtccgcatgagcgccttttaccaccagtaaattatcctgggcagtaatctccagttcgctttccgcgaaaccggcaacggcaatggcgatgcggtagtggttttcgtctaccagctcaacgttgtacggagggtagccgccattactttggctttggttattttcaagcaggttaaacagacgatcaaaaccaatggcagaacggtacagcggggataaatcaaagttacgcataatcataaactcctgaaatcagcgagaatgtcagaccttccatcatggacaggccaggattgccagaacacccatcaggcgtgcccttctattcactacgtcttataaatgggtctgaatacgtacttttcaagtattttaatccggcttttttttgcagtttattggctattgcatagactggttgggacagcactgattgttaaagtgcgattaccgccacagtgccacgtactggtgatgttatttttagcaacggatcgctataactcatcatgcaaataacgacaaccaacagatgaatgagtgatgataaaaaacgtgtggttaacgctgataatatggaatgggatgcttttattaagcggttgttcaagcgtcatgtcgcacaccggcggtaaagagggtacttatcctggcacgcgcgccagcgctacgatgatcggtaacgatgagacaaactggggcaccaaatcgttggccatcctggatatgccatttaccgccgtgatggatacgatccttctgccgtgggacatcttccgcaaagacagttcggtaagatcgcgcgtagagaaaagcgaggaggagacgaaaatgaccaatgccgtcatccccccggcgaagatgcctcctccctgatttatcgcccggtttccgtcacccatagctgacggaaccctttcacctcttccatccatgcgacgtgtcgcccatccggtgaaaaaacgacggcgtccgcagacggcgggttgtcgtgcctggcggttaagaagtcgatcctcccactttgtgcgtcgcagcaggcaatccggttttccagcaccagtcccagccatttacccgacggatgccagttaaacgctgactgtacgccggtcgcatgatgcgttaactgccggggctcgcctccctgcggcgatatcagccacagttgcgctacgccgttatcgtcccgcatcaaaaaggcgatcgccgtcgcctgcggattactgcggacccagtggcgtggttcgttagtgagtccaggataaacacgctggtgagtaaaggtaagacgccgctgaactacgcccaacggcggcgatggcatcgttgattcggttcccgtcagcggcgtgtcgcctgcctgtttccagccgttttcatgacacggtaaatcgacaataaacagctccgggacttttttgcccgtcagcgacagcgtatcgccaataaaggcgatctggcggttgcccacccagccctcttcataggcgcggttaatgtcatcgctgccaggtctcggcgcaggcgtcgtgcggctaaccagtacgcaccagtagctaccgctgtattcgcgcggatgctgaaccggtaccgttaccggcccatacggcacggccacgccgacattacgtagatccagcgccggatctcgctcatgcagaacgtggtcattataggtaaaactcaccagctcgccgttcgggctaaacacatggacgtgactgccgccgcgcagcgcgccgggagtatacggcgcagtaatatccatcgcatcgaggttagtcacgccccccggcgttgcaataacgccccggcggtggtggaaatcgtaatgccacgtctcatcagggttttcagggccatgaataaacacatagtgattgtcggcaggatgcaccgtcaccacaccgacatgcgcgccctgcacagcgcgataaatcacctccacgtcgccggtatgcacattgacacgctcaatggtcttgcccgtaaatgacgcgcctgaaggccgtacatcaaagaccagccactggctgtcaggtgtccaggtattggtgttggtaagctggtgatggcgcggcgtaaaagtgatttgtttcatgggatgtcctgataagagacgatgctcgtcatcatactgcacacgggcttcactttcaggctttagcgtatcgttgggatagccaggcccgatggcgccacgccaccgggccgtcagggcattatttctcctgcgccagccggatactgcgctctatcaccgcccgccgggcgtcacccgccggcagcagcttcagcatcatctcccaggccgccaccgcctcgccaaagcgctgctgctcaaaggcgttaaacgcatacaggcttaacacccggatatccgtgtggtcgcggctcaccagccggcgcagcagctccccgccgcggcggttatcctccgggtcggacgagcgcgtcagcgcctccgcgtagcccagcgccgcatcgcggtttttcgggtccagacggtaagcgtttgcataggccccggtggcggtaccggcattacccagtaccataccggtgcgccccagcatgagccagccctcaacattgccggcatcattctgcaggcgggtgcgcagccccagcgccagccgcgccatctcctcctcattcagcggctgcgcctgcgggtccagcgcccgcgccagcagcccgggcgtctgcgccgttgcctgctgccaggccctgacctgcggatagctgccggtcagggcgtagctgccggcgccgaccgccagcgcaatgacggcccccggcacgtaaacgccccacccggcgcgcgcgccgcaaaccggggtgtccgccggcagcggctcccggcgcaggcgcacccgccggcgcgtgcgggcgacgattatccacccgcccgccacgatggcggccagcggcagcacccacagcagcaccgtcagcggggtcagcggcgggtcgtaggtgacaaagttgccgtagcgcgccaccatgtaatcgatgatttcctggcggctcttcccctcctgcatcaggtcatacaccctgcggcgcatgtcggtggctatcatcgcgttcgagtccgcaatgctgttgttctggcatttcgggcagcgcagctgctccgtgagctggcggaactgctgctcctgcgcttcatctttaaacggcatcacgtcggtggttgcccgcgctgacccggagataaccagcgccagcatcagcatcaccatgcccggtaacagtctcattgcgccgcctcccggctgtatctgtcccacagcggtttcagttcactttcccatacccgggcattcaaatcgcccgcatggcggtagcggataatccccctgccgtcgatgaggaaggtttccggcgcgccgtacacgcccaggtccagccccagcatcccgtcgctgtccgataaactcagcgcatacgggttgcccagttcctttaaccaggccaccgccttcgcccggtcgtccttatagttcagccccaccacccggataccctgcgcagaaagctggttcaggtactgatgctcggcgcggcaggtcgggcaccaggtggcccagacgttaagcagcaccggtttcccctgcgtcagcacctccgcctgatagtactgacccggcgtctccagcgattccaggcggaacgccggcaccggctttccggtcagtgccgattcgagattcgtcgggtcatccccctgcgcgttgcgcgccagctgccacagcagcgccgcggcaatcagcagaaaaatcagcagcggtaataacagtacgttgcgtttcatccggcctccggcaatggtttacggcggcggtagcgcgggtccgccaggcacagcagcccgcccagcgccatcagcagtcccccggcccatatccagcggacaaacggtttgtagtacaggcgcacggcccacgcgccgttgtccagctcctccccgagcgcggcgtacaggtcgcgggtcagcccgccgtcaatcgccgcctcggtcatcaccatccggctggtgttgtagagccgtttctccgcgtgcagcaccgcctccggctcgccgtggcgcgtcaccccgatgagggccaccccgccgcggtagttgggcccggtgatgtcccgcacctcccggaaggtgaagcggtagtcgtgaatggtcacgctgtcgcccgcccgcatccgcacgtcacgctccacgctgtaattctggctgaaggcgatgccggtaatcgtcaccgccagcccgaggtgcgccgccaccattccccagtagctgagagaggttttcgtgccgcgggacacgcgctgtacggcttcggccaccgccagcaccgcaatccagcaggccatcgccatccccaccgccgtcatggcgatgattttatcttccagcagccatggcaaaagtaccgacagcaccagggtggagaccagggcggtgagcagcagcgtcctgatgttacgcggccggtcccggccccagcgcaccagcggccccacccccagcagcagggcaaaggggaccatcagccaggtgaacatggtgttaaagaacggctcccccaccgaaatgctgcccagccccagctgtttgtgcaccagcggcagcagggtgcccagcagcaccaccagcatggcggccatcagcaggacgttgttgccgagcagcagcgactcgcgcgaccacagcgcgttgttcacccgcgaacgcaccctgtgcccgcgcacggcgaacagcagcagcgagccgccggtgaccagcaccataaaggcgaggataaacatcccgcgcgccgggtcggaggcgaaggcgtgcaccgacaccagcaccccggagcgcaccaggaaggtgcccagcaggcacagcgagaaggcgcagatggacagcagcagcgtccacgccttaaagccggcgcgctgttcggtgaccgccagcgagtgcagcagggcggtgcccgccagccacggcataaaggaggcgttctccaccgggtcccagaaccaccagccgccccagcccagctcgtagtaggcccacgccgagccgagcacgatgcccagcgtcaggaacacccacgccgccagcgtccacgggcgggcaaaacgggtgaacgcgctgtccagacgcccgctcagcagcgcggcgatggcgaaggcgaaggccaccgagaagccgacatagcccatgtacagcagcggcgggtggaaaatcagccccgggtcctgcagcagcgggttcaggtcgcgcccctccaccggaaaggccggcagcgtgcgggcgaacgggccggaggtgaacaggatgaacgccagaaaaccggcgcagaccatccccatcaccgccagcacccgggcgacgatatccgccggcacctgccggctgaacaccgccaccgccagggtccagccgctcatcagcagcacccacagcagcagcgagccctcgtgcgccccccaggtggcggccacccggtaccacaccggcagctgcgtgttcgagttgccggcgacataggccacggtgaagtcgttaaccacaaaggcgtgcaccagcacgaaaaacgcgcccgccacgcagataaacagcagccaggcgaacaccccggccgacgccatcatccgcgcgtcaccgcgcgccacgccccacagcgggtaaacggacagcagcagcgccacgccgagcgccaggcacagcagcgcgtggccgtattcaggcatcatgatgaggtgtccttatcagcgcgttgcgggcggcggtggttttcctgcatcgccttttccacttccggcggggtgtagttctcgtcatgtttggccagcacctcgtgcgccaggacgtggttgcccttctccagggtgccctgcaccaccaccccctgcccctcgcggaacaggtccggcagtatctcctcatagctcaccgtcaccgacccttcggcgtcgtagagactgaagttcaccttcagcgagtccgggtcgcgcctgacactgccgggcatcaccatcccgccgacgcgcaggcgctggcccgccgccggcagctgctgcgtctcgcgcttgccgtagaggatttcgccgggggtatagaacaggtcgatattcgcgcgcagcgcgtacaggaccagggcggtggtcagccccaggcccgccagcaccgcgcagaccacccatagccggtttttacgtcgcaggttcacgcggcctcctgttgcgcctgtgcggcacgcatccgcgcctcgcgcgcccgctgctgcgccacgccgcgcagaatggcccggcgctgcagcaccgtgtgcagcgccagcagcgccagcggcgccacggtcatcgccaccgccagccagacaaaaaaggcgtacccgcccatggcgaaaaaatcgctccacgatgaaaatgccggactcaccggtgcccccttttcagtatcagttcgctcacccacgggcggcgtttttccatcagtaaaatcaggttgcgcatccgcatcagcgaaagcgtcataaagagcagcaggtagccggcgatggcccagcgcagcggcgagcgcatcgccgggtcgatactctgctgcatccgcgtcgagccctggtgcagggtgttccaccactcgacggaatagtggataaccggcaggttcaccacgccgaccagcaccagaatgcccgccgcgcgcccggccattttacggtcgtcaaaggcgtgccacagggcgatgaccccggcgtagagaaacagcagcaccagctccgaggtcaggcgcgcgtcccacacccaccaggtgccccacatcggtttgccccacgccgcgccggtgaccagcgcgatgaaggtgtacaccgcccccaccggcgccatcgccgcgacggcaaggctggccattttcatctgccagaccagcccggtgaacgccgccaccgccatcgccgcatagatacccatcgaccagatggccgccgggacatgcaggtacataatgcggtagccctccccctgctggtagtccgccggggcgaaaccaaagccccggacccagcccgtggccagcacaatgatgccggccgccgccagccacggcacgagcctgccgcaaatctgatacagccggggcggcgccgccagctgatgaagggttttccacatagtcgtcacctgacctcctgaaaccagtaaaatgtccgtcgcgccggggcgctactgcacgctgaggcgcagcgccgccgcggtggcgaacgggcttaacgtcgcgctgcccgccagcagcgctcccagcaccgccagatagccgtcagcgggtaaatgcatcgatgccgcgtccatcgccgcggcggcgaaaatcagcaccgggacactcagcggcagcaccagaatgcccagcaggacgccgccgcgccgcagcccggccgtcagcgcaacgcccggcgcggcgagaaaccccagcgccggcgtgccgagcagcagcgtcagcgccatgattttccagccgtacacgtccatccccagcagcagcgccaccagcggggagagcataatcagcggcaggccggtcaccgcccagtgggccagcaccttcgccagcaccaccgccggcagcggcaccggcagcagcatcagctgctccaggctgccgtcctgcaggtcgtcgcgaaacagccgctccagcgccagcagcgaggccagcagcgccgccacctggatgatgcccggcgcgatacgcgccagcagctgcggctgcggcccgacgcttaacggaaacagggtgatgaccatcaggaagaaccacagcgggccggcgatgtccgcgccgtggcggaacgccacgcgcagttcgagacagaagacacgccacatcacagcccggcccccccgccggtcagcgccaggcggcggacggtgtccgcggcccccggcagcggctggtgggtggtgagaatgaccatcccgccctgcgccgtgtgcgccgccatccgccgggtgaggcgcgccacgccgttaacgtcaatggcggtgaacggttcgtcgagcacccacagcgcggcgcgggtcagccacaggcgggccagcgccacccggcgctgctgcccggccgagagctgagcgaccggcacgtcctcaaatcccgccagcccggcctgcgccagcgcctccgggagacgcgcgccgtcgccggggtggaagaagtgcaggttctcccgcgccgtcaggcgggttttgatccccggctggtgccctatccacagcagactgcgatggaagctgtcgcgcacgcggcgcaggggttcgccctgccagtacacctccccgccgtccgggcgcgccagcccggtcagcaggcgcagcagggtggtttttccggcgccgttgccgccggtgacctgcacccactccccggcctccacggtgaacgacagcccgcgaaacagcgtcctctcgtcccgctcgcagtacagatctctggcttcaagcatcattgtcattgcgcatattcaggttgatatggcgtataaacaccggtcaggctttccaggaaggcgacgatatcgtcaatatcgttttgcggcagatcggtgccaacctgataacgcagcatcagttttaccgctccatccagcgtcggtacgtcgccccgatggaaataaggcgctgttaacgcgacgttgcgtaagcccgggactttttgccgtaatttatcgcgaacctctttggtgacgttcatacgaccaatatccgctgcggtaatttcgccaaaattaaagtctcgctttaatcccaatggttcaaaagagcgcccgcctaaaatgataccgccgtgacaggttgcacatttattctctttaaataattgataaccgtgtttctgttgcgcggtcagcgcattttcatctccacgtagccatttatcaaaggcggaatccggcgttatcaacgttttttcgaattcggcgatcgcatcagtaatattttccccggtaaatccttgcggataaaccgcctggaaatcttttttcaggacaggatctttatcaagcttgctaataatttcatcccaggatttagaggccatttcaataggatttaacggtggtcctcctgcttgctcctgcagggttgcagcacgaccatcccaaaattgttcgatattaaatacggagttgaataccgtcggcgcatttattggtcctaccgcaccgccaacgccaattgaggtttttctgccatcgacaccgcccgcatttaacgcgtgacaatgcgcacaggatattgtgctgtcgccggataaacgttcatcatgataaagccggaaacctaagtcgacttttttcgcatcgacgggaatattgcgcggaataggctgaacgggttcattccggtgcgccgggtcggtatcggcgctggcatagttgcgctcacgctgatcggctatccagttcaggatgtcagtacgctctttatcgctgacgccccccgcccagtgcagcgcgacatagcgggttggcggcatagtctgatgttgcataacccattcaattttattcagttcgctttgcggcaccggcgtatccgcaatcagggcggcccgtaccgcctccaggttaaacgacttgtagccgagctggatatcgtaatccattagctgctttgccaccggaaaagaggaataaaaaggcaattcagcggaaggcgtatgacaataatcacatcctttctccctgaaataacccagtattttattattttcacccacaaccgaggcctgcacatcgctttttttactgcgctgtttgtcgtaataccatacatacccggacaaacctaaataacataacagcccaacggtgataactgttgtcgcatagagggtaatttttttcatatcactatccttatggggtattgcggcatgattaattaaattttatttttttactcatgaggcccgtcaatactaaatacaaacccatcatggatattgattggtatcaataattacaattggctaaacctatagatatgataacccccgactatcgtaagatttattttgcgatgtccgtcacagggtttattcagcagcaacaatggataaatcctcttttccgtcatcaaaacgaacgatagccaacaataattgacttaacgcagcataaaagccatagggatcatgcttaaggcaattatttgtaaattccggaagccattccagtaatgacgacaatgttttctggcgtaatttattcattctccgttgttggaacgattcacccaatgaaaaatgtaaatggctgagtaattccagataaatcgccaggtggtcggtcggctctttaaaatcgtcgttgacttccatcccggcttcaagcaataaatgtttaatcatgccgggttcctgctgcgggtattgcgaggcgtagggcaaggccgattttttatccgtcatcaggaacaatccgcaaaaatctgcggccagctccagctgcgcatcctggcgcaggctaagcgcggcaattttttgttcgagtaacgccaccgacgccgccagcgcaggctgacgctttaacagcgccagccagtccgcgatctccgcggactgtaattgtattaacccttcatcatccacttcccggaaaaagagtaacgccagccatgcatatacgcaggcgtactgttcctgagcaagcgctggctgcttaatcatgcggattcccctgcgatgcgggtacatattcacactgcgcgaccatctcgaccggaccgttaaacgccgtgacgttatccatagggccggtatatttttcaatttccaccagcgtcgtatgcgcgctggtcgcctgcgcaagctgtgatgtaccgatatccagcgttaatacgttagggttgccgtacttacacaacgcgttgagatcgccgcctttatcaggatcgtaccaggcgccttcatgaattcgcgccacgcccggcgcatagcgatcggaaactaccgctcccgccagtacctgcccgcgtgcattgaatacccgcacgatgtcaccgttgcggatcccgcgcgcgctggcatcctgtgggttaataaagaccggctccttgccgccaacggcatattgctgacgcagcgtttccgactcgcacagttgggaatgcagacggaaatcagggtggacggattgtaagtgcagcggccagcgctgcgatcccggcccgccatgcgagcgttcgattttttcgaaccacatgggatggccctgacaatcgtcgtattgcatgtcggcgatggttttggagtaaatctcgatcaaaccgcttggcgtgcccaacggctccaggtccggatcttcacggaaagcctgatggcgtacaaacatctgcggatgatcaaactcgatgtactcctgttgattccagaacacctcgaaaatcggtaagtggataccgcgaccttttccctgctggctcccttcctgccagatgcgtttcagccagcccatttcatcaagaccttccgtgaatgccgcttcacggttaaagcgtcggcagagatcgcggaaaatatcaaagtcgttacgcgcttcaaactgcggcgacaccacctgtttcatggcgataatgccgcggttagagtggttgccgaactgatcgaggtcgttacgctcaaattgggtggtagccggcaaaacgatatccgcaaagcggcaggtcgacgtccactggttatcaatggcgatgaccgtttccagcttgcgccagccttcaattatgcggttaatttgttggtgtcggtggaacgggttggtcccggcgaacacgcacatcttcagcggcggtaatttaaccgatttgccgttccagttaatgatcttgcccggttcaagaatggcatccataaaacgcgcaataggaatggtgctgctgtagcctttgtaatccgtgctgtcgtgcactggcggaacggtcgtcgaaccggaaaagccgcttaaaatgatccctttacgaccaggcgtcccggcgccgttatagtgccagccaaaaccaaagccgccgcccggtaaaccaatctgtcccagcattgccgccagcacgacgaccatccatgaccactgttcgccatgctgcatacgttgtacgcaccagccagcgatgatttgcgttctgtcgcccgccatctgccgcgccaacgcgcggatggtgtcggcgtcaataccgcacagtttttccgcccaggcggcatctttgggctgtccatctttctcgcccagcaaataggggaggaactggtcaaaaccgacgcagtagttatcgaggaaatttttatcgtacagtttctcgctgtacagggtatgcgccagcgccagttgtaacgggacatccgtctgcgggttaatggcgatatgtttgaccttatcgcgccccagataatcgtgcgtggaggtgacgaccgggtcgatgctgatgaccgagatagcgccgctggcaaccttctcttttaattgttcatagtactgatagacatcgtgatccgggcaccaccagtttgcctgctggtttttcaccatatcagaaccccatagcacaatcgttttactgttctgtaaaaccagaggccatgacgtttgctgctcgtacacttccattgaacccaccacgcgcggcagaatcacctgcgccgcgccggtcgaatagtcccctcccgtgctaacgctattgccatgtagcgcaatcgcgcgcgccagcatcccggaggcgttatggaacatgccggtagattgccaaccgctcgccgtcagtagcgcgctcggcccgtaggttttttgcacccgctccagttcctgatagaacagatccagcgcttcatcccaggagacgcgcacaaaacgattatcgccgcgctgcgaggtgtcgctttgatgacctttgcgcatccagtcgacgcgcaccatcggatagcgaatacgcgccgcgttgtggacgtgatcgggcaggccggcgatcattttggacgggtatttatcctgttcaaacggttttgccgccacaaatcgaccgtcaaccaccgtggcgcgaatcgccccccagtgagaaccggtaaggataccctctttcgtcgcggcgcctggcgcaacggcatccgctgcgcgggcgctacggggcgtcagtagtgacggccccagcattcctgccaccgtcaagccgccaagctgcgccagaaaacgtcgacgagagacgtgtaacgagtccttatttttcattgtgttctcccttatcgctgtgcggcgtgttggtggtatcagacgcattcatctggagatatttcaacaaggtacgttcttcacgcttatccagactggtgaaaccgatcatgccgttgagcgtgccgatccagccgttagcgtcaaagtgcgctttgtccggcgcgccgtgacactgattacaggtgccgttatagagggagtcggcataggcccaaatcggtttaatgtcatttaccatgtcgcctttttgcatccacgcagttgcctgtaatttgctccactgagtattggtcgccgcgacggtggtctcttccagcgttttcacatgctgttgcacatcgccgcgaatcgaggcgacaaaaatacgtttaccgggcaactgcgtcagcacgcgctggcgaccgtccgtctccgtccagccttcgatttgcacttgcagccagtcaccgtcccgtttaaggactttcacttcagaagcaggtaacagcgaacctgccggttctttatcgcctttagcggcgtaaatcggcttgatatccagcgaatagagcgtatcgccgtcattatgcgtactggcgctggcgcgcagttcatcaaactgtttgcggaaaccgctgctcatatccggtagctggtgggcaatccctttatggcagtcgatgcaggattgattttctttcgcggcgattttcatttgccgcgccgcttccgggttctgtttcgcgtgatccatcgcatcgtagttatggcaggaacgacaggtcgcggagttattctctttcatgcgcgcccattcacgctcggcaagctcggcgcgtttggcttcaaatttttccggggtatcaatcgagtgggcgataaatgtctggtaaagatcgttgctggcttccagcttacgtttcaccatgcctggaatatcaggggggatatggcaatcgtggcattccgcgcgtacgccggaagcgttctggaaatgtacggactgtttatattcctgatacaccggctgcatactatggcagctgacgcaaaactctgtcgtactggtcagtttgataccgacgtgaggtaacacgatcagcgcaacgccgatcacaatcccgacaatgaccagcgccagtatcgaccaacgggcgcttggcctgagtagcgctctccagagttttcgcataatagcccctgtaattatatggtttaatgcgcagatcttattccgcaaatatgaacagcgtcactggtcaggatgaacgggatacggcaatatatgaacagatatgaacagaaagagaccgcgcgcaggatgtcacatcacattgttattgttgaggatgaacctgttactcaggccagattacaggcctattttgagcaggaggggtatcgcgtttcggtgaccgacagcggcgcgggcctgcgtgacatcatggagcatgagcacgtttcgctgatcctgctggatatcaacctccccgatgaaaacgggttgatgctgaccagggcgctacgcgaacgttccacggtgggcattattctggtgacggggcgttgcgaccaaatcgaccgcatcgtcgggctggagatgggcgcggacgactacgtcaccaagccgctggaactgcgcgagctggtagtgcgggtaaaaaatcttttgtggcgtatcgatctggcccgccccacgccgcaaaatgccagtgaaaactgctatatgttttccggctactgcctgaacgtgatgaatcacacgctggagcacaacggtgaagccattaagcttacgcgcgcggagtacgagctactgctggcctttgtgaccaacccaggcaaagtgctgcatcgcgaacgtctgctgcgaatgctttccgcccgccgcgtagagactccggatctccgcacgattgatgtcctggttcgccgcttacgtcataaaattacgccggaactgctggtcacacagcatggcgaaggctactttttagcctcggaggtgtattgatacagatagacgggccgaaatcccggaggcgatagcgaacggcgaacgcgcgcgctgtcggcgttgttatgcgtcaaaataagcaccggcgggctgatattttcaggcaccggttgcccctgtaagaccttaatcgactgcgttatcgctaattctccctgccaggccatctgatcgctgagcgccatcaggatatggccgcgttttaaaccgcgataaacctgatgcgtcagataaaatgagacgatcgtgagcggagtcgtcaaattacgcccttcgcccatcgccgcctccgccgctatcgccgacccggcgacccggcgaccacattggcgtccggatggcgttccagcatttcctggagtaagtttcgctgcacttcaatgtcgttatcgccccaggcgatatccacaatgttgatggcgctgcctttaattgcctgacgaaaacccgccaccatctcctgactgccgccggcttcttccggccccgggaagagtaaaacgttaagcgcttttcctttgctccactgcaccaggaaacgtcccggcagataacccatctgaaaccacggcagaccgacgtgagttgccacgctggcgtcgcgtatcacgttcgccacttcaataaccggcacattaccggcataccgttccagttccgggaaacgaatggtactgctgccaagcagaatagcgtcggcgccccactcccggcactgcatcatttgctgttgttgcgtcgccagttgccgatagccattcgcttccagcacttttaaatcaacgccatacaatttggccgctttttgcatcccgtagttgacggacaaccagtaagaatctttcaggctggggtataatgcgcacagtttccagggtttactcgcattgactgacgtttgccgccagggaatcgcccgatcggcgcgcgtccagtgtagcagtccggtttcggctgacgccgtttctatattcgagacgatgattatcaaaaaaaagaacgaaataagcgcgcgcatgatagccccaccagcaacaaggttttatcctaatggtttttccggcggcaactcaacccatttcacccgcggcgcataaatgtcaacgccttcactgacccgcagattatggctggccttcgccctgatggcggcgctcaccctgctcagcaccgtgatcggctggataagcctgcgcgtcattagtcaggtggagcaaaccaatacgcaagcgctgctccccacgatgaatatggccaggcagttaagcgaagccagcgcttacgagctcttttccgcgcaaaatctgaccaatgccgacagtgagggcgtttggctggcgcaggggaagatgctgaaagcgcaaagccttaaaattaaccatcttttgcaggcattaagcgagcaggggtttaatacctcggccatcgcccggcaagaaaaagagattgcacaaacgcttgggcaacagggaacgctggtcggtgaaattctcacgctgcgcgcacagcaacagcagttaagccgccagattgcggaggcggcggaaagcattgccgcccaggctcacggtcaggccaataatgcagcgacatctgcaggcgccacccaggccggtatttacgatcttatcgaaagcggtaaaggggatcaggctgaacgcgcgcttgaccgactgattgatatcgaccttgagtatgtgaatcagatgaatgagttgcgggtcaatgccctgcggtttaagcagctcattgtgaccttaaaagacgcgcaagggctgagcgatgccgaagacaccgatgaaaaacttaatcagttggttaaaattttatcccgccgccagcagcgtatagaagatcctaccgttcgcgcccaaatcgccgacgcgctggagacaataaaccagtacaccacactggttaccctgtttcgtaaggaaaacgccatccgcgaccagcttcaaacgcttatggccaataacctctttcagtttacccgcttcagtacggaagtgtcgcagttggtgaacgccatcgaaaaacgaaacgaggctgggttagcgcgtcttacacacgccagtcagcgtgggcaaatagggttagtgatcttaggcatcctggcgctgtgctcattaagttttattctttggcgagtggtttaccgctccgtatcccgcccgctggcgcaacaaacgcaggccttacagcggctactggagggcgatattgactcgccatttccggaggcggctggcgtcagcgaactggataccatcagccgtctgatggaagcgtttcgcgccaacgtgcgcaaattgaaccgccatcgtgaggatttggcggaacaggtgcgatcgcaaacggcggaacttcatgcgctggtgctggaacaccggcaggcgcgcgccgaagcggaaaaggccaacgaggcgaaatcgacgttccttgccgccatgagccatgaaattcgcacgccgctttacggcattctcggtacggtacaattgctggccgataaaccgctcatgacaaactaccgcgacgatttacaggccattaatgattcaggcgaatcgctactggcgattcttaacgatattcttgattactcggcgattgaagtaggcggcaccaacgtttccattagcgaggaaccgtttgaaccgcgacaattgttgaatagcgcgctgcatttaatgcacagccgcgttcaggtggcgctcatcaccgactttagcgagcaactcccctcaacgctacaaggcgatccgcgccggatacgtcaaattgtgattaatcttttaagtaatgcggcgaaatttaccgatcgcggcagcatagtgctgcgcacgttttgcgacgatcagagctggtttattgaggttgaagataccggatgcggtattcctgaagcgaagctgacggctattttcaaaccgtttgtgcaggcgacaggacgccggggcgggacgggcctggggctggctatcagcgccagcctggcagaggcgatgggcgggacgctaaccgtcaccagtacgcttcatgttggcagttgttttcgtttacaactgccggtttgccactccaaacccgcaagtaaaagtgcgttcagggaaccgataaatcttaacggactacgcttgttgctgattgaagataatatgctgacgcagcgtattaccgctgaaatgctcacgggcaaaggggtgaaggtctcacttgctgaaagcgcgaatgacgcgctacgctgtttagccgaaggcgagtcctttgatgtcgcgctggtggattttgatttgccggattatgacggcttaaccctggcgcagcagttgatgagcctgtatcccgccatgaaacgcattggttttagcgcacatgtgatagacgataatcttcgtcagcgtaccgccggtcttttctgcgggattattcaaaagcccgttccccgcgaagagctttaccgcatgatagcgcactatttacagggcaaatctcacaacgcgcgggcgatgttgaatgaacatcagcttgccggcgatatggcgtctgtcggcccggaaaaactccggcaatgggtcgcgttattcaaagacagcgcgctgcctttagtcgaggagatcgaggcggcgcgcgccatgaatgacgacgttaacattaagcggctggcgcataaattaaaaagcggctgcgccagcctggggatgacgcaggcaaccgaagcctgtcgggaactggagttgcaaccgcttagcgatatagatattaaaactatcgtgacgcagggagtgacggcgctcgacgcatggatagccggtcatccttcgccataatgacttccggctcgccacggccaacttatccgacgcgtttcacatcgcccactaacaggatgtaagacagcgcgcccagcagggccacaacggagatatagaccagcgccggagcaaaaccgtagctttgcgccagataaccaatcactaacggtacgctaatcccgcctaacccaccgataaagttaaacataccgccggtaaggccaatcaaccgcatcggcgcaagggaagagattaacgaccaggtaatggacgcaaatccgttgccgaagaaagctatcgccatcaacgccataatccacaacggatcgttagtgtagttagcgcccataatgcatgtggagatgagcaaaccgcaaataatcggcgttttgcgcgccacgcccagcgagaagccttttttcaccagtttatccgccagccagccggagagcagtacgccaaaaaaggcagccaggaacggtacggtcgtcataaagcccgcttttagcgcggtaatgcctttttcctgggtcagataattagggaaccaggtcagaaagaaccatagcgtagagtttacggcgaactgaccgaggtagacgcccaccagcttacgatggaacaccagtttccagtcggctttcgtcagcggctggcgggcctcttttttcgctggcgcatcgccatccaccagaccaccgccatcgcgaatatactccaactccgcctggctaaggcttttcgtcaaacgcggcggttgataaaccttaaaccagaccaatgaccagataatcccgataccgccggtgacgataaagacccagtgccagctcagcatttcctgaatccagatcagcagcggcgtaaggaatgccagtccgacgaactgtccggaggtgtagaacccgactgcggatgcgcgctcatgctccggaaaccagctagtgaccatccggttatttgccggaaaggccggcgcctcgaaaatcccggtaatagcgcgcaggccgataagcgacaatagtcccgtcgcaaacccctgcaatagcgttgcgactgaccagccgaagatagcgataaaataggtcagccgggacccaatacggtcgagaaaccagccgccggggatctggcataacgtatagagccaggcaaaagcggagaagacatagcccatttccgctttggtaatgccgaattctttttgaatatgcatggaagctacggcaaggttggcgcgatcgacgtagcaaatcaccacggtaataaagatcatcaccagcgtcagatagcggcgacgccccggctgtgctgctgtaactgaaatatccatcgtcatctgtctccagattctgggcatagcgaggccgctcaccatgccctgtaaattacagagggtgtgtttttatatttaaattgggttgcccggagggcgacgtttgttgagcctacagcgtggcgatcaccactcggctaccgatccgtcagcgtgccgccacaacggattacgccagtccggcgcgcttttgctaagttcaatcaccctggcctcgtcaatgtctacgccaagacccggtttggttaagggtttaaagaagccgccgtccatgctgaagtcttctttatttttcacaaagtcgagcagctccgcgcccttgttatagtgaatgcccatactctgttcctggaataccgcgttgcgcgaaacaaaatcgatatgcaggcaggcagccagggcgattggacccagcgggcaatgcggcgccagcgccacatcatatgcttccgccattccggcgattttatagcattcggtaatgccgcccgcgtgggataaatccggctgtagaatcgccagcccacccgcgtccagcacgcgtttaaattcaaaacgcgagaacatacgttcgcctgcggcaatcggaatatgcgtttgcgctgccaggcgcggataatattccgcctgttccgccagcaccggctcttcaataaacagcggacgatagggttccagttctttaatcagcaccttcgccatcggcgcgctaacgcgaccgtggaaatcgagcccaaactcaatttcactgccgaaagcttcgcggatttgcgccacggtattgaccgccgcatccaccgcacgggagttatcaatcacgcccatctcttcacagccgttcagcttgaaggtgtcaaaaccaataccgcgcaatttttcaataccgtcaatgacgtctgccggacgatcgccgcccacccagctataggccttgattttgtcgcgcaccaggccgcccatgagctgccagaccggcgcattcaacaccttgcctttgatatcccacaatgcctggtcaataccggcgatggcgctcatcataatcgggccgccgcgataaaaaccggcccggtacattacctgccacaggtcgttgatacgcgccggatctttccctatcaggtagtcggcaaactcatgtactgccgcctctacagtacgtgcccgaccttcaatgaccggctctccccagccaaccacgccttcatccgtttcgattttcaggaacatccaacgtggaggtaaacggtacgtggtgatgtgagttattttcatttcactgcctctcgatacgcattaacaaatgccgcagcctgctgcgcggtgcgttcaacggattgcccggcgcgatagagatcgctacccaatcccgcgcccacacagcctgctttaatccattgcgctaggttttccggcgtcacgccgccgacggcaaatagcggaacatccggcggaagtaccgctttcagcgcgctgatgtagcccggaccaaacgccgacgacgggaaaatttttaacgcctgtgcgcctgcatccagcgcagaaaaggcttccgttgccgtggcgcagcccggacacacggtcatgccatagctcaccgcccggcggatcacctccggttggatattcggcgtgacgatcagcttgcagcccatcccggcaagctggtctacctgttccggtttcagtacggtaccagcgccaataagcgccctgccgccatacgccttcaccacggaagaaatgcttttttcccactgtggggagttaagcggaatttctatagcgtcaaatcccgcatccaccaccgcgccaacgtgcgccagggcatcatcgggcgtaataccgcgtaagatagcgatgagagggagattagtttgccactgcatgagcgatgctccttattccagcctgaaatgccatatcgccatccacggttgaaacatcacgcccaatagcactaaacgcctgttggtaacgtgagatcagcgcgggtccagcgacgagagtgatagcctgttgcgccgcgaaggattcgctcatgctggcgacttccgcgccaatcaacaggccggagaggaagtcgctgacctgctcacgcgcaagatgtcccaacacgtgcgaggcgcgaacctcaaaaagagaaggcaggacggcaggagaattaagaccgcgctccagccccgcggcataggcgtcgccagaaacttcctgttccggcaaaccagccccgaccagcgagtgacgcagcaacaagtgatggagttcgcctgtcatcacagtacgaaaatcatgaatttgttgcgtatcagtctgtacccatttgcaatgtgtgccgggcatgacatagacagaagaaggagaaagttcgcaggcgccaagcagttgcgtctcttcgccgcgcatcacgttgtggttatcctcgcgtgagacacacaatccggggatgatccagatgttgtcgccaacggcggttaactgttcgccaatagcggagaacagggcgggaaccggcagataaggcgcattttgccagcctacgttactgccgatcatgcccgccattaccacgggggtggcgctgtcgcgccagtgtgttgtgacttctgctaacaccgcgtcaggagatttaccgttcaggcgtgtaacgcctgcttctgattgcctgctctccaggcatttgtcgccctggtaaagccaggcgcgcagattggtcgatccccagtcaattgcgatgtagcgagctgtcatgtgatttcctttaaccttcgtgtcgagctggcgatcatggttaatgccgcctgctctgccgcatcgccatcctgatgccgtatcgcatcgaatagcgccttatgttcctggagcgttttcggcatgttggccgcatcgcccatccaggtccgttcaaataccgctcgctgtagcgagctgatcgctacatttaactgttgcagcaccgggttatgcaccgactgcaacactgcttcgtgatagcgaatatccgcctcgttaaacgcttcccggtcctggttattggcaatcatgtcgtttagcgccgactcaatttcagccagatcgcttgatgttgcccgttccgccgcccagcgtgctattgctggctccaccaggtttcgtatttcgctcatcgcgctgataagcctcgggtcgtagtcgttttccagcacccattgcagcacgtcggtatcgagataattccactggttacgcggtgcgataaacgcgccgcgataacgcttcatttcaattagccgcttcgccataagcgagcgaaacacttcgcgaatgatgttgcgcgacgtttcaaactcctcgcacagatccgcttccgctggcagcgccgaaccgggtacgtatttaccgctgacaatctgtttgcccagcgtgataacgatgcgatcggttttattgagagtcatagagagtccttgtgctcgatgtgaactctcttactttaccgcgatagctgaattacgccgcaattttgtagtactagcgtgatatcaaccgtcgttatcatgccattaatgtagtacaacacaattatgttgtactacaatttagatcacaaaaacgacaattggttatgggaacgttataagacgtaaacgaaagacataaaaaaacccgcagcaagtgcgggtcgttaagcgagtatttgcccgatggcgactatgccttatcgggcggggaaatggccggatgagtgatcggggttcagcacaaatttttcaatcgcccaggcaacaccatcttcaaggttcgatttagtcacaaagttagccacctctttgaccgacggaatggcgttgtccattgccacgcccataccggcgtattcgatcatcgcaatgtcgttttcctgatcgccaatcgccatcacctcctctggcttaatacccagcgcctcgaccagtgattttacgccagtgcctttattaacccgtttatcgaggatttcaaggaaatacggcgcacttttcagcacggtgtacttttccttcacctctgccggtatacgcgcaatcgcccggtcgagaacggcaggctcatcgatcatcataactttcaggaactgggtgttcgggtccatcttctccgcttcacaaaataccagcggaatggtcgccacatacgattcatgcaccgtgtagtagctgatatcgcggttagcggtataaagcgtatttcggtctaatgcgtggaagtgagaacccacctcacgggacagtttttccaggtaacggtagtcatcatagctgagcgccgtttgcgcaaccgtactgccgtcccctgctttctgcaccagcgccccgttataggtgatgcaataatcaccgggctgttccatgtgaagttctttcaggtaactgtgcacacccgcatacggacggcctgtggtcagcaccacgtttacccctttttcacgcgcagcggcaatcgcgtttttaaccgccggagaaatggtgtgatcgggcagcagaagggtgccatccatgtcgatagcaatgagtttaatagccatgaaatccccgcattaaatgagtcctgactcatgctaacgcgattccgctcaaaaaacagtaaagaatccgagagaaagggggataagattcacaaacgggattccccttttcaggccgtattctctcctcctgatgtattagataacctcattaatcaaacagaaaataccgtttttctaaaagaatgcgtattgctactttggacatcatcacttagagcctaatgggattggttcttaatcagtaaaaatcaacaaaaacttatattttaaaataaccttatccgatgagaaggagatcgctaatgtcgatggcccttaccgcccccccaaccaggaaaagatttttaatcgttgcctgtctgtttattggaatatttattgcttatctcgatcgcgttaatgtttcggtattagccgcgaatgaacccttcttagcctatatgggtattgaaggcatgcccttgcaaatcggcatgatgatgaccgtctttctggccgcttatggtatcgctaacgttgtattatcaccgcttggtgattatctcggccccagaaaagcgatgatgctttgtattctgatctggactatcgctttaatgattggcggagtcgctacatcattcgctctaattattatttgccgtatattactgggcatcggagagggattttattatccactgcaaagcgtatttattaaaaactggttcccgaagcaggaacgcggcagagcaaacgcggcgtggatcgtcggccagtcagtcgctcccgccattgcgatgccttttttcacctggtggataggcacccacggctggcgctccaacttctttttatgcgccgctcttgggttaatcccactctggctactttggcgatatgttgctgataaaccagaacaacataaaagtatcagcgagcaggaactggcttatatcaaagccgggcaggaaacggaaagcgcaggcagcagcgaaagttttatgttgcgggtcaaaccggtgattaccaactacagctattggctgctggtgctgtggtatctgtgtctgcaatgtttatattggggaatgattacctggctgccgacctatctaaaatcagccagagggttcagttgggcggaaatgggctggctggcgtcgcttccctttgtcctgtcgatatttgccaaagcggccgcaggcgtcttcgtcgataaaataggacgcagcgcccccatattaatggtattaatgtttttcgctggcgtcagtatctatttcggcaccataaccgaacataaatatatgtcggcggtactcctctcctttgctgttgctttctgtacgatgggtacgcccgttgcctggacgttattacagggaatgataccaggaaaatccatatccgccgccagcggcgtaatgaacggcgtcgccaacggactctcttcattatctcctgtatttatcggcttatttatttctatcactggaacttataccggcggcttactatgcctggtttttatcagcgctatcgccgtggtatcggcattaatcttaacgattaaaaaatattaattacgaggagtaaatgatgaaaattaccagcgttgatattattgatgtggcgaacgattttgcgtccgccaccagcaaatggcgtccggtggtggtaaaaattaataccgatgagggcatttccggttttggcgaagttgggctggcttacggcgtcggcgcttctgcgggcatcggaatggcgaaggacctgtcggccattatcatcggcatggacccgatgaataacgaagctatctgggaaaaaatgctcaaaaaaaccttctgggggcagggcggcggcggcatcttttccgctgcgatgagcggcatcgatatcgcgctgtgggatatcaaaggcaaagcgtggggcgtgccgctgtataaaatgcttggcggcaaaagtcgcgagaaaataagaacctacgccagtcagctacagtttggttggggggacggcagcgataaagatatgctgaccgagccggagcagtatgcacaggcggcgctgaccgccgtcagcgaaggctatgacgcaataaaagtggataccgtcgcaatggatcgccacggcaactggaaccagcaaaacctcaacgggcctctcaccgataaaatcctgcgtctgggctacgaccgtatggccgccattcgcgatgcagtcggcccggacgtggatatcatcgccgaaatgcatgcctttacggataccacctcggcgattcagtttggccgcatgatcgaagaactgggcatcttctactacgaagagccggtcatgccgttgaaccccgcgcagatgaagcaggttgccgataaggtcaatattccgctggcggctggcgaacgcatttactggcgctggggataccgtcctttcctggaaaacggcagcctgagcgtgatccagcccgatatttgtacctgcggcggcatcaccgaagtgaagaaaatctgcgatatggcgcatgtttatgacaaaacggtgcaaatccacgtttgcggcgggccgatttccacagcggtggcgctgcatatggaaaccgcaatccctaacttcgtcatccacgaactgcaccggtatgcgctgctggagccgaatacacagacctgtaaatacaactacctgccgaagaacggcatgtacgaagtcccggagcttcccggcatcggccaggaactgaccgaagaaaccatgaaaaaatcaccaaccatcaccgtaaaataagccaactgtctgcctgcgccgcaggcagacaccctgtatttgcgagtcgtatcaacgcgaccttatccagcctgagataaaatcctctcagtaaaggggtaacacaggtggcaaatgaatttaactatccggcaatttcgcgcgtttctggccgtcgcggatttgcgtagttttaccgccgccagcaaatatctgtgcatcacgcagggagctgttagcggtttaatcaacgaaatggaaagccagatggaggtttcccttttcgaccgcacttcgcgcgtggtgaagctatcgcccgacggcgaaaagtttttacccgccgccatgcgggttgttgaagagtttcaacgggccgaaaattatgcccgcgacctgaaagagatcaaaaaatccctggtgcgggttgttggcgcgccgctgatcgcctgtgcttttctgccgcaaatcatccatgcctttaagcggcagcatccgcatacccacgtacagcttattgataagcccatgtcgcaattacaaaaaagcattatgttgggagaagccgattttggtatcggcccggagcggccgctggaaccggaaatcgacaaacaaacgctgttcacaacggaaatcgccctgtactgccatccggactatcggctgcataaaaaaacggttcgctgggaagagattcaaagcgaagagctgatcgccgttggcaacgaatccattccgatgatctccgcaaccgctggcgtgcgcattaagcccaaaatgacggtggaacatatggcgaccgccatgtcgctggcggcgcagtgtgaaggcgtggtgatcgccggaaccttttcccgccattacgccaaaagctaccaattagcgacctgttcgctcacgcctccgctgcggcgcaatatgaacctttatttccatgcgtggcgcgcacaaacgcccgccactcagcgctttagagattttttattcagctatgtcgatgaacatcatgatgccccggccaaccagcggtaggccggggattaaggcaggttaaatatcgatattcgctgctttcagggcgttctcctcgataaaggcacgacgcggctcaacggcatcacccatcagcgtagtgaacagctggtcggcagcaattgcatctttgacggtcacgcgcagcatacggcggctttccgggtccatggtggtttcccacagctgatccgggttcatttcacccagacctttataacgctggatagccagaccgcgacgtgattctttcaccagccactccagcgcctgctcgaagctggttaccggctggcgacgctcgccgcgttcgataaacgcgtcctcttcaatcagaccacgcagcttctcgcccagcgtgcagatacgacgatattccgcgccggtcacaaactcgtgatccaacggataatcggtatccacgccatgcgtacgcacgcgaacgatcggctcgaacagattctgttccgtattagtatgaacatcgaacttccactgactgccgtgctgctctttctcgttcagctcggtaatcagcgcattcacccagcgcgttacagtctgctcatcagaaagatcggcttcggtcagagttggctgatacaccagctctttgagcagcgctttcgggaagcgacgctccatacgaccaatcattttctgcgtggcgttatattcagagaccagtttttctaacgcttcgccggatagcgccggcgcatgagcgttcgcgtgcagagtcgcaccgtcaagcgcgatggaaatctggtactgatccatcgcttcgtcgtctttaatgtactgttcctgcttacctttcttcactttgtacagcggcggctgcgcaatgtagacgtggccacgctcgacaatttccggcatctgacgatagaagaaggtcaacagcagcgtacggatgtgcgagccgtcgacgtccgcatcggtcatgatgatgatgctgtgatagcgcagcttgtccgggttgtactcgtcgcgaccgataccgcagcccagcgcggtgatcagcgtcgccacttcctgggaggaaagcatcttgtcgaagcgcgctttctcgacgttaaggattttacctttcagcggcagaatcgcctggttcttgcggttacgcccctgcttcgcagagccgcccgcggagtccccttccaccaggtacagttcggacagcgccgggtcgcgttcctgacagtccgccagtttgcccggcagaccggctaaatcgagcgcgcctttacgacgggtcatttcacgggcgcgacgcgccgcttcacgcgcacgcgcggcgtcgataattttgccgacgacgattttcgcgtcagatgggttttccagcaggtattcgctcagcagttcgttcatctgctgttctaccgccgatttcacctcggaagagaccagcttatctttggtctgtgaggagaatttcggatccggtacttttacggaaaccaccgcaatcagaccttcacgggcatcgtcgccggtggcgctgactttggcttttttgctgtagccttctttgtccatgtaggcgttcagcgtacgggtcatcgccgcacggaagcctgcaaggtgagtaccgccgtcgcgctgcggaatgttgttggtaaagcagtagatgttttcctggaaaccatcgttccactgcagcgctacttccacgccgataccgtctttttcggtggagaaatagaagatattcgggtggatcggcgttttattcttgttcagatattcaacaaacgccttgatgccgccttcgtagtggaaatgatcttctttgccatcgcgcttgtcgcgcaggcggatggagacgcctgagttcaggaatgacagttcacgcaggcgtttcgccaggatctcatattcaaattcagtgacgttggtgaaggtttcgtggctcggccagaaacgtaccatcgtgccggttttatcggtatcgccagtgacggccaggggtgcctgcggcacgccgtgctcgtagatctgacggtgaattttgccatctcgctggataaccagttccagtttttgcgacagagcgttgactaccgagacgcccacgccgtgcagaccgccggagactttataggagttatcgtcaaatttaccgcccgcgtgcagaacggtcatgatcacttccgccgccgagacgccttcttccgggtgaatcccggtcggaatgccacggccatcatccgttacggacacggagttatcggcgtgaatagtcacgacgatatctttacagtgacctgcgagcgcttcgtcgatagcgttatctaccacctcgaataccatgtggtgcagaccggtgccgtcatccgtgtcgccgatatacatacccgggcgcttacgcaccgcatccagccctttcaggactttgatactggaggagtcataagaattcgacatcaacgtttctcgctcatttaatcttgggttaatccgttattttacccttttccacggtaaacatcttcgaattttcatccgacatgtctataacgtgttcagcgctaattgcgctgacaaagacctgcgattgcgtggcttttaagcggctggccagcagtccgcgacgcgcatcgtcaagttcagaggcaaaatcatctatcaggtacaggcagcgccgcccgctttcgcgggtgaggaactcgccctgcgccagacgtaaggcgcacatcaataactttagctgcccgcgcgacagggtatcttccaccggcgcgccgtcggcgcgaatgcgaaagtccgctttatgcggcccgtgcgcggtgtaggtcaacatacggtcacgctcaaagcttcgctccagcacgtccgcatagtctgtctctttctcccagccgcgctggaaagagaacgtcagggaaaattcaggtaaaaactgctgacaggtatccgccatgtcctgtgcgatagcgctactgtactccgcccgccaggtactaatttgttccgccagcggaatcagctctttatcccacgggcgcaattgctcataacgactcacctggcgcagcgcggcattacgctgtttcagcaatcgtttcaggttgctccaggcggtgaagaatccggcttcgttgtgaaagcatccccagtcaaggaacgctcttctgtatttggggccgccgttgagtaaagtaaacccctccggcgtaatcaactgcatcggcattaaatgcgccagctccgcgatcttgtgaccgtcggtaccgtcgatacggaccttgctgtcgccctgcttatctttggttaagccaatcgacgtctcacgctcttcgctctgtaatcgcccgtgaagaacaaacgcttcctgctcatgacgaatcacgcggccaggctgcaaactgcgaaacgcccgaccatggccaagcgtatagatagcttccagcacgctggttttgccgctgccgttggcgccaaccaggaagttaaagccgggggataaagcgagatccgcattttctatgttgcggaagtctttgattaaaaggcgcgtcagtgacatatattagtacattcgtccaggggcgtgtgtgtcgcagccagttcgtctaccgccagcgcgcagaaagcggagcgtacacgaagtacgtgagcatttcgagcactgccgggaggcgaaatggcaagtaaaccagccccttttcagattctacagcctcattggcataacaacgtaggcagcactctgtgacgccgcatcctcaatctgtacgctggatacggaatccgtcagcataatgcgcacggtttcgcacttcagcgcattgagcacgtccagcacgtaactgacgttaaagccgatttccatctccgtcccgccgtagctcacgtccagaatctcttccgcttcttcctgttccgggttattggcggtgattttgagctgattctcactgacgtacagacgcacgccgcggaatttctcattcgagaggattgctgcgcgggcaaacgcctgcttgaggatatcgcagcccgcttccagatgtttatccggattcttcggcagaacgcgacggtaatccgggaagcgaccatccaccagcttcgaggtaaagataaagtcgccgacgtgcgcgcggatattattactgccaatctgcacgcgcagcgggttttcgccgccgtcgagcatacgcatcagttcaatcacgcctttacgcggcacaatcaccgagtggctgggtaaagacgcttccagcggcattgagcacaccgccagacggtggccgtcggtcgcgacagtgcgcagttcgctaccttccgtttcaaacagcataccgtttaagtagtagcgcacatcctgatgggccatcgaaaactgggtcgattcaatcaggcgcttcatcgtggcctgcggcagcgtaaattcaacttcgctttgccagtcgtcaagattcgggaaatcggcggcaggcagcgtagacagcgagaagcggctacggccagaacgcaccagcatccgatcgccttccaactgaacggcaatctccgcgccctccggcaggccgcggcagatatcaaagaatttccgcgccggcacggtagtggcgcctggctcatgcggctgagaaagcgtaacgcgcgcgaccatctccatttcaagatcggtgccggtcagagaaagcgtaccgtccgctacctggaggagcaggttaccgagaatcggcagcgtaggacggccgcccagcgggccgctgacctgctgaagcggttttaataaatgttcacgttcaacggtaaatttcataggatcacgacgacaatgttctgattaaattcgaaaaatcttctttgatatcgtggctttcttcacgcagttgctcaattttacgacaggcatgaagtacggtagtgtggtcgcgcccgccaaacgcatcgccgatttccggcagactgtggttggtgagctcttttgccagcgccatagccatctggcgcggacgtgctaccgagcgagatcgacgcttagaaagcagatccgcaattttgattttgtaatactcggccaccgtcttctgaatattgtcgatggtgaccagtttttcctgcaacgccagtaaatcgcgcagcgcttcgcgcacaaagtcgatagtaatcgcccggccggtaaagttggcattggcaatcacccggttcaacgcgccttccagttcacgcacgttagagcgtagacgtttggcgataaagaacgctacttcgcctggcagacgaatatcattttcgtccgcttttttcatcaggatcgccacgcgggtttccagttctggcggttcgatcgccactgtcagcccccaaccaaagcgggacttgagacgatcctcaacgccgttgatctctttcggatagcgatccgacgtcaaaatgatctgctgattgccttccagcagagcgttaaaggtatggaaaaactcttcctgggatcgttctttattggcgaagaattgaatatcgtcgatcagcaatgcgtcaacggagcggtagtagcgtttaaactcttcgatggcgttattttgcagggcttttaccatgtcctgcacaaagcgctcggagtgcatatacacgactttcgcgttgggtttacgcgccataatgccgttacccaccgcgtgcagcaggtgagttttacccagaccggtgccgccatagaggaataacgggttataagcgccgccaggattatccgccacctgacgtgccgccgcgcgcgccagttggttggatttaccttcgacgaagttatcaaatgtatgttttacattgacgttggagcggtaggtcggctccgctggcgctggtacgttatcccagcccgaacgggccgcaggcgctacgcgctgcggctgcgccgttgttgtctgcgcaggcgcgacaacgttatgcacaggcgtttttagcgtttgcgtaacgggctttgttcccacttcaaaacgcagttgtggggcatccgcgccgcagaatgtgttgagtaatccattgatattgttgaggtacttatctcttacccaatcgagcacaaaacggtttggcgcatacaaagccagcgtgttatcgctcagttccgcctgcaacgggcgtatccacatactgaattctgtggctggtaactcatcctgcaatcgggcaagacactgctgccaaagcgaaagtgacacggcggactccactcgaacaaaagtcgataaatgacaaaggctgatacattaatgattgttggcgcacgtcgataagaccctgcatgaagggtgacgcacgaaccgctgtctgcggttttcacggatctttcaaacgatcgcgacttcacgcagtctgaaaaatttcgtgttcatgcctgaccaggatcgtttgaaacgatcaggaccgcggatcatagcctaaactgagcaagagatcttctgtttctcacagattcttccctatttatccacaggactttccaggaaaggataagtgtaatcgatcctggggaactcctgtacgctttcgcgcgcatattgaaaaaattaataggtaaaggtgagcagacgcctaaaagatcgcataaagatccagggcgatccttgcgctttacctggcagtccgtataattctccacccgtcgcgcaatgcccgtcatatggcgtcaacgctgcttattttccgcacaaaaaggcgtggaaaatcgcgggaaaataaggaaagagaattgactccggagtgtacaattattacaatccggcctctttaatcacccacactgtggcgtaagtcgttcaaagtttgttcgggtatacgcaaaagtcagtgaatttattcaagtttaggtagaaatcgccatgaaacgcacttttcaaccgtctgtactgaagcgcaaccgttctcacggcttccgtgctcgtatggctactaaaaatggtcgtcaggttctggcacgtcgtcgtgctaaaggccgcgctcgtctgaccgtttccaagtaataaagctaacccctgagtggttaagctcgcatttcccagggagttacgtttgttaactcccgctcatttcacattcgtcttccagcaacctcaacgggctggcacgccgcaaatcaccatcctcggccgcctgaattcgctggggcatccccgtatcggtcttaccgtcgccaagaaaaacgttcgacgtgcgcatgaacgcaaccggattaaacgtctgacgcgtgaaagcttccgtctgcgccagcatgaacttcctgcaatggatttcgtggtggtggcgaaaaaaggggttgccgacctcgataaccgtgctctctcggaagcgttggaaaaattatggcgccgccactgtcgcctggctcgcgggtcctgatagcccttattcgggtctatcaacgcctgatcagtccgctgcttgggccgcattgtcgtttcacgccaacgtgctcaagctacggaattgaggcattgcgcaggtttggagtgataaaaggcagttggttgacggtgaaacgcgtattaaaatgccaccctttacaccctggtggtgacgatcccgtcccgcccggaccatttgataccagagaacactaacgatggattcgcaacgcaatcttttagtcatcgctttgctgttcgtgtctttcatgatctggcaagcctgggagcaggataaaaatccgcaacctcagactcaacagaccacgcagacaacgaccaccgcagcgggtagcgccgccgaccagggcgtaccagccagtggccaggggaaaatgattacggtgaaaaccgatgtgcttgatttgactatcaacacccgtggtggtgatgtcgagcaggccttgctcccggcttacccgaaagaactgggttccaacgaaccgttccagctgctggaaaccaccccgcagtttatctatcaggcgcaaagcggcctgacaggccgcgacggcccggataacccggcgaacggcccgcgtccgctgtacaacgtcgagaaagaggcgtttgtactggccgacggtcagaacgaactgcaggttccgatgacttatactgacgccgcaggcaacacgtttaccaaaacgtttgtctttaagcgtggcgattatgcggttaacgtgaactatagcgtgcagaacgccggcgaaaaaccgctggaagtctccacctttggtcagttaaaacaatccgtcaacctgcctcctcatcgcgacaccggcagcagcaactttgcgctgcatacattccgcggcgcagcgtactccacgccggatgagaagtatgagaaatacaaattcgacactattgccgataacgaaaacctcaacgtcagctccaaaggcggttgggtggcaatgttgcagcagtatttcgctaccgcatggattccgcgtaacgacggcaccaacaatttctacaccgccaatctgggcaacggcattgtcgctatcggctataaagcgcagccggtactggtacagccaggccagactggcgcgatgaccagcaccctgtgggtcggcccggaaattcaggataaaatggcggctgttgcaccgcacctggatttgaccgtggactacggctggttgtggttcatctctcagccgctgttcaagttgctgaagtggatccacagctttgtgggcaactggggcttctccattatcatcattacctttatcgttcgcggtatcatgtacccgctgaccaaagcgcagtacacgtcaatggcgaagatgcgtatgctgcagccgaaaattcaggcgatgcgcgaacgtcttggcgatgataaacagcgccaaagccaggagatgatggccctgtacaaagcggagaaggttaacccgctgggcggctgcttcccgctgatcatccagatgcctatcttcctggcgttgtactacatgctgatgggttccattgaactgcgtcatgcgccgttcgctctgtggattcatgacctgtccgcacaggacccgtactacattctgccgatcctgatgggcgtaacgatgttcttcattcagaagatgtcgccgaccaccgtgaccgacccgatgcagcagaagatcatgacctttatgccggtcatctttacggtgttcttcctgtggttcccgtcaggtctggtgctgtactatatcgtcagcaacctggtcaccatcattcagcagcagctgatttaccgtggtctggagaagcgtggcctgcatagccgcgagaagaaaaaatcctgattcggtgtaggccggataaggcgaagccgccatccggcaaggcgcgccggtcagcctgatggcgctaacgcttatcaggcctacaatcaaaaggcggtcatatgaccgcctttttttattgcaacaaagttgagactaaccatgagccataacgacactatcgtcgcccaggcaaccccaccgggacgcggtggcgtgggtatcctgcgtatttccggtctgaaggcgcgcgacgttgcgcaagaggtgctgggcaagctgccgaagccgcgctatgccgactacctgccgtttaaagatgttgacggcagcgcgctggatcagggtattgcgctgtggttccccggcccgaactccttcaccggtgaagatgtgctggagctacaagggcacggcggtccggtgattctggacctgctgttaaaacgtatcctgacgcttccaggcgtgcgcattgcccgaccgggcgagttctccgagcgagcgttcctcaacgataagctcgatttagcccaggcggaagccattgccgacctgatcgatgccagttccgaacaggcggcgcgttcggcgctaaactcgttacagggggcattttccgcccgcgttaaccaccttgtggaagcacttactcacctgcgaatctacgtcgaagcggctattgattttccggatgaggagatcgactttctctctgacggcaaaatcgaagcgcagctcaatggcgtcatcgccgatcttgacgccgtgcgcaccgaagcgcgccagggcagcctgctgcgcgaagggatgaaggtagtgattgccggacgcccgaatgccgggaaatccagcctgctgaatgcgctggcaggccgtgaagcggccattgtcaccgatatcgccggtaccacgcgcgacgtgttgcgcgagcatatccacatcgacgggatgccgctgcatatcatcgataccgccggactgcgcgacgccagcgacgaagttgagcgtatcggcatcgaacgcgcctggcaggagattgaacaggccgatcgcgtgctgtttatggtggatggcaccacgacggacgccgttgaccctgccgacatctggccggactttatcgcccgtctgcccaaaaatctaccgattaccgtggtacgtaacaaggcggatatcaccggcgaaacgttgggtattagtgaagtaaacggtcactcactggttcgcctctcggcgcgtaccggcgaaggcatcgacgtgttgcgtaaccacctcaagcaaagcatggggtttgataccaatatggaaggcggcttcctggcccgtcgccgtcacctacaggcgctggcggaagccgctgaacaccttgagcagggcaaagcgcagctattaggcgcatgggcgggggaactgctggcggaagagttgcgcctggcgcagcaaagcttaagcgagattaccggcgagtttacctccgacgacctgctgggacggattttctccagcttctgtatcggtaagtaagttttagtccaccctcgtcagtgaacgttcactaacccgcattaactgcctgttaacgcgggtttttactttccatactcgtccatagtcgtgcgggttcatccgcgatttttgtgtcctgaattgtccccatctttaaatccctcgtgtaccattgtttactttttgatctaaaaattacatcaaatgaacacaaaaaacggtataaaaaacgctcaaatatcccttctcatggacacactatagaggtgagatatggcactttcagataccaaattacgcacacttgctcccagaaaccgcccctggcaacttgccgatcatgacgggttggtgattgaagttcttcccaccggacgaaaaatctggcgtttccgctaccgctttgacaacaaatcgcaacagatcacgctgggcgaatacccagctttctcacttgcagaagcgaggctctggcgtgaaaagtgccgctcactggttgcccatggcatcaatcccgcgcagaaaaagcaggaagaaaagcttaaacagaaagacccaacgacagtcaaaacattcgccaaacgctggctgaccgatatcgttgaaaaaagtaaccgcgatccacgcaacatcactcgcgttatcgagaaggacatcattcccatcatcgggaagctggaactcgaagaactcacaactgcccacattcaggtcgtgctcgaccgcatcaagcaacgaggttcggatcacgtcgcattactgacgtgaaacgtgcttaaacgcatgctggcctatgcaatttccaggggaatcatcttcaacaacccggcagcggctatcgaggctcgttatatcacacaagcaacaagtcgtgatgtggcactgaccgcagaagagatcggcatcctgttacgggggatctacacctctaacatgaaccgacgccacaagctggccctgcacctgctgatcatctgcatggtgcgtaaatcggaattgattgaagcaacatggagtgaagttaacttcaacgcgctggaatggcgtatccccggcgaaagaatgaagatggataatccacatattgttccgctgtcaaagcaggcgctggcgatgttcgaagagctaaaatttctggccggagattccccttacgtcttccccagccgacacggctaccgacgtccgatctccaaaacaacgctgaactgtgcggtgcgtacgcaggatctgaacgtcagggattttgttattcatgacttccggcgtactgccagcacattgctacatgagcagggctacaactcggattggatagagaaatacctggcgcataagatcggcggcgttcacggtgtctacaaccgtgcggagtaccttcagcgccgggagatgcttcagtcttgggctgattttgttgatgcgcagattgagactggaaggaaggttatcattggacaattcgggaagtcttacaatgtaaccgtatgaataatatggaaaatataacaataatagtttctgattagaatatactatctaaccggttgaaaaagatgcacttctcaaccataataacatcactctttagcgttaggctttgatttatagccttgtcgagcgtttcgccagacactaacttattgagtacttttagggttgcgctagaaagttttctaccgatcctagaagtctctaggatcggtagaaaactttctagcgcctcctctagtaaagagtaaaaaacgagcaaaaaacattgctcgtttttttcatcaacggaagacaaatcaaaaatacataacgtttaaatcaatgtttgaagaaactattaaaaaacaatttgaattgttagacataagtaacttcaatgttgatatatctcatcgtctccttttcgtgtgtggtggcaaagtcgatgtacgtgcaccaattccccccagttttagggatagactactcacttacacagcaaaaaatgcctctgaacttcacgaacatttcattctagctgagacattcaaggattattttaaagagaatgcctatccggaccttctggtgtttgaagatgatatagccagtatttcatctcttattatcatttttttagaaagcccaggatcattagttgagttaggtatattttgcaacaaatcagaactatttaaaaaaatactgattgttgcttcagcggaagaagtatacggtgaggactcattcatttatttaggcccactagagtatattaagaagaaagtctcatcctctgttgtaatctatccttggccggatcctgaagtcttaaaatacgataatgattttcttgatgatttatgtgtaaatataaaagaaaaactttcatcaatcccaaaaacagaacaattcagtaaggataattctggacatatagcacttctaattactgaaattatatctctttgcgccccaatacaacttagtgaaatagaatcagccctaaactcattagggattaatatttcaacaaaaattattaacagatcaatttatttacttcagaaagttggttttatagacgttttatcatatagctcaaacaaatattactttccattaaaagagcgcaaatgggtaaaatttggtaaaactaaagataataaactcatagataatcaacaattaaaaatgaaggttagacaatcttttgtaacattaaccgatccattatcaaaacgaagaattacagcgctgcgtcaaataatagcaaaaaaagaaatggctgaggagattaattaatggacatattacagcatatttcagatttactattaaccaagaaaagtgaaatcatttccttttcattgacggcaccttatcgctataaaatatataaaattgcaaaaagaaactcagataagaagagaaccattgctcatccttcgaaagaactaaaatttatacaacgtgaaattactgagtatttaaccgataaattacccgttcatgaatgcgcatttgcatataaaaagggcagtagcattaagaccaacgctcaagttcatcttcatacaaaatacttgttgaagatggattttgagaattttttccctagcataacaccacgtctatttttctcaaagttacgacttgcaaatattgatttaactgcagatgataaagtactacttgagaatatattattcttcaaatccaagagaaatagtaatttaagattaagtattggagcaccaagctcacctttaatatcaaattttgtgatgtacttttgggatattgaggttcaagagatatgctctaaaataggcgttaactatactcgttatgctgatgatttaaccttttcaacaaataataaagatgttttgtttgatatacctgacatgcttgaaaacgtactgcctaaatattctttaggtaggattagaatcaatcatgaaaaaacagtgttttcttcaaaaggacataaccgtcacgttactggtataactctaacaaacgataacaaattatccataggtagagaaaggaaaagaaaaatctctgccatgatccatcattttataaatgggaaattatctactgacgaatgcaataaattagtcgggctacttgcatttgctaaaaatattgagccttcgttttataaaagcatggtcattaaatatggatctgataatatttataaattacaaaaacaaaaagacaaataatttctgctgcacttttatagacaccagtgttttgttgattatgcccagaacaacttggaataagttttcctaagcgtattacattatacgcttggcctaacttaatcatagattttccagaaaaataaatttttcaaatcccataaacaattccccacagcttccctacgcccccggtcaaccagggaacgaagcgtggcctgaaactgacctcctgtctcgatacaggtgaccacaccctttatcgctaccctgttgcaagcgtagcggcagacagaacgctgtagataagtcggacggcattgccgaaggctttccgtccgtacttcctgctgaatgtgcaaaacgcggcgtcacttttaagagcgtaagagagtgaaagtgacgccagcgcgcagatcagcttcaacccggctactgcctgcaaatccactgcaacaaactggctgacactcaaacagatgtcagaaattcacttaccagggtcaatctggccgggatctcaaaaaatgcatggaactaaaacgggtctatttacagtttcaccagctacttggtttttgtgtcctttaatgtgcccatagccatgttttcaaggcaaattatagattatatatcaacgaattatctagattttccagtttctgtattggtgtcgggtgacggctgacgccatccggcttacgtcactgccggggtgatatctcattgcctcataggaaatcactgttgtccaaatggcaactcgtctcgcgcaacatcgccccgtattcttagcgccacacttttcgtgaggccgctatgaaacgttttctactgtgtagttttgccctggttttactctatcctgccggtattgatatgtatctggtcggtttaccgcgtatagccgccgatctgaacgccagcgaggcgcagttgcatatcgccttctccgtttacctggccggaatggcgacggccatgctgtttgccgggaagatagccgaccagtcaggccgcaagccggtcgcgatcgtcggcgcgctcgtctttatgatggcctcactgctttgttcacgggcgtcggaaggctcgctatttctgagtgggcgttttcttcagggagtaggcgcaggcggctgctatgtggtggcgttcgccattctgcgcgacacgctcgacgagcatcgccgggcgaaagtgctgtcattattgaatgggattacctgtattgtgccggtactcgccccggtggtggggcatttgattatgcttcgtttcccctggcaaagtctgttctatacgatgtccgcgatgggcattattgtgggcctgttatcactgtttatcctgcgcgagacgcgcccggtaaggctggctccacgcgatttatcacgatcgtcgcccgccgccgagtcgctgattaaccgttttttcgttagtcgactggcgatcaccacccttagcgtgtcggtgatcctgacctttgtcaatgcctctccagtgctgctgatggaggtgatgggatttagccgtggcgactatgccattaccatggcgctcaccgcaggcgtcagtatggtcgtctctttttccaccccttttgcgcttgggttatttaagccgcgaaccttaatgctcgtctcacaggggctgtttttgacggctggcgtgacgttaagccttgctcataccaataccgtcacactctttggcctgacgcttatctgcgccggattctcggttggttttggcgtcgcgatgagccaggcgctggggccgttttcgctgcgcgccggagtggccagttccacgctcggtatcgcgcaggtttgcggttcatcactgtggatttggctggcggcaatactcggtatcagcgcgatgaatatgctgatcgggattctgattggttgtagcatagtgagtattctgctgatcttctccgtcacgcccaacaggtccgtagccgagcatgaagaaatcccttaccaatctcgaccttaatttgctgttatgcctacagttactcatgcaggagcgcagcgtcactaaagctgcaaaacggatgaacgtaacgccctcagcggtcagcaaatcgctggcgaaactccgggcatggtttgacgatccgctgttcgtcaatacgccgctgggcctggcgccgacgccgctgatggtcagtatggagcaaagtctggcggactggatgcagatggggaatcaactgcttgataaaccgcatcatcaaacgccgcgcggtttaaaatttgagttggcagcagagtcgccgctgatgatgattatgtttaattcactgtcgcagcagatttatcagcgctatccgcaggctaccattaaggttcgcaactgggattatgactcgctggaggcgattacgcgtggggaagtcgatatcggatttaccggacgcgaaagccatccccgctcgcgagaattgctcagtctgttaccgctcgcgattgattttgaggtactgtttagcgatttaccgtgggtctggctgcgggaagatcatccggcgctgcgcgaagcgtgggatctggacacttttctgcgctacccacatatcagtatttgctgggagcaaagcgatacctgggcgctggacgatgtcctgcaagaaatgggacgcaaacgccatatcgcgttgagcctgccggggttcgagcagtcgctctttatggccgcccagccgggtcacaccctgatagcaaccgcgccgcgctattgccagcactacaatcagctccaccagctaccgttagtggcgcgccccctgccttttgatgcgcaacagcgggaaaagctgatggtgccgtttaccctattatggcacaaacgtaatagtcataatcccaagattgtgtggctacgacaggctatcaacacgctctgccgtcgccttatctgaccacctgcgttgataaattaaccttcctcttaccagaaatgtcaccatctgattaaagaaccttctgaaattgaatttttagcgcgtaaaacctgtccataatttacgttaatgttactctcgtcattatcacggcccattaatcacggagcgaaaaatggcgactcactttgccagagggatacttacggagggacagttggtttcaattcgtctctcttcgtcttgccatattgaagccagaaacctgcctgctcaccgacgaacgcgttttctcgcctccagaggccttcttgccgaactgatgtttatgctgtacggaattagcgagctgccggaaatcattattcaggcgaaaggtaaacccgcgtttcgtgacaaaaatctgccaggcttttctatctcctatgccggaaatatggttggcgtggcgttgaccaccgaaggagagtgcgggctggatatggaattacagcgcacctcccgcggctttcaccatccgcattcgctcgaacgccaccctttctcccgtaatgaaaacttatgggtagccaatcaaaacgatcccaacgaagcgcgagcgcaactcatcacattgcgccagagcgtgttaaaactcaccggcgatgtcatgaatgacgatccgcgggagctgcaacttttacccgttgccggacgcctgaagtgcgcgcatgtcacgcagcttgaagccgtgtgcgatgcggaagatgtgctggtatggtccgtaaccgttacgccagcgatagaaaaattaaaagtgtgggagttcgatggcaaactgggctggaaaagcctgcccgatatccagacgcgcgccaatgagccaaccggtcgtctgatgcgattcgcccaactccccgccgccaaatcgtatacgcttaatcgttcataatgaaaaaaggggcacgtatgtctgaaacgctgaatgtggttacactgctgggaagtttacgcaaaggttcctttaacgggatggtggcgcgtacgctgcctaaagtcgcgccggcaggaatgacggtatcgccgctgccttcgatcggggatattccgctgtatgacgccgatatccagcaggaagagggatttccagccagcgtagaggcgctggcggagcagattcgcaacgccgacggcgtcgtcattgtgacgccggaatataactattccgttcccggcggcctgaagaatgccatcgactggctatcccgtctgcctgagcagccgctggcgggtaagcccgttcttatccagaccagttcaatgggggcgattggcggcgcgcgctgccagtatcatctgcgccagattctggtgttccttgatgcgatggtgatgaacaaaccggagtttatgggcggcgtgattcagaataaagtcgacccgcagactggagaagtggtggatcagggaacgttagatcatttgaccggtcagttgaccgcatttggcgagtttattcagcgcgttaaagcgtaagttcgttaaaaaccctccccccgatggggcgagggttcatttcatcagtgtgcgtcaataaacacaatcttcagcacaaataacagcgcgacaatcactacgcacgggctaaggtcgcgcaggcgaccggtaccgattttcatcacgcagtaagagataaagcccagcgcgataccttcggtgatcgagaagctaaacggcatcattaccgccgtaataaacgccgggaccgattcggttaaatcctgccagtttacccgcgccaggctggaggtcatcagcacgccgacgtaaatcagcgcgcccgccgccgcgtaaggcggcaccatgcccgccagcggcgacaggaagataaccagcaggaacaaaataccgaccaccaccgccgtcaaaccggtgcgaccgcccaccgaaacgccggaagaggactcaatataagcggtcacagaagacgttccgacaaatgcgccagtgacagaagagatactatcaacaaacagcgcctgcttcatgcgcgggaatttgcctttctcatccgccaggccggctttatcggtcacgccaatcagcgtaccggaggagtcaaacaggtttaccagcatgaaggagaaaataacccccgccaggccaagattgaacgagcctgccaaatcgacatgccctaccacgctggtgacgcttggtggcgcggagacaataccgttgtagtgtacatcacccatcatccagccaagcagcgtcgtgacgatgatggacaccagcaccgccgcatgaatgttgcgcgaagcgagaatcgcaataataaagaatccgagaacccccagcagcacgctgtgcgaggtcaggttgccgatgctgaccagcgtttccgggttagcgacgatcacgccggcgtttttcagccccatcatgccgataaacaggccgatgccgctggtgatgcccacgcgcaggctgaccggaatgttggcgatcatccagtaacgcacgcggaagatagtcagcaataaaagaccaacagcgccccagaaaatggcgcccatgcctacctgccacggcagtcccattgcctgcacaaccacgaaggcaaagaacgcattcagccccatcgcgggcgccagcgccaccggcaagttagcgaacaggcccatcagaatactgccaaaggccgcaatcagacaggtggtcacaaagacggcgctggtgtccatgccagctacgcccagaatttgcgggttaacaaaaacgatataaaccatcgtcaggaaagtggtaaaaccggcgatcacttcggttcgtgccgtcgtgccatgttcgcgcagtttaaacacgcgttccagcataccctgaccagaagcctgggtggtgtgttgttgactcattatcaatttccggagaaaggagggaaaattcgccgttatcctataccaaaatgcgacacctggcgcagttgtgtggtaatttttttcactcaatttgttagtacggcaacgattgcgtcccctcattcagcattacgtaaacgttaaacttgttaaaatggaaatgacatgtcccaaatcgaagcagtgttttttgactgtgacggcacgctggtcgacagtgaagtgatttgctcgcgcgcctatgtcactatgttccggcagttcggcattacgcttgagctcacggaagtattcagacgctttaaaggcgtaaagctctacgaaattatcgataccatcagtaaagagcatggcgttgcgctggcaaaggcggagctggaacccgtgtaccgcgcggaagtggcgcgcctgttcgataccgaactggaagcgatcgcgggcgcaaataccctgctggagagcattaagacgcccatgtgcgtggtatccaacgggccggtcagtaagatgcagcattcgctgggtaaactgggcatgttgcatcattttcccgatttgctgtttagcggttacgatattcaacgctggaagcccgatccggcgctgatgctccatgcggcgaacgccatgaaggtcaatgttgagaagtgtattctggtggatgattccagcgcaggcgcgcagtcaggaattgcggcgggaatggaagtattttatttctgcgccgatccgcataacaaaccgatcgatcaccctaacgtgacgacgtttaccgatttggcgcagttgccgggattgtggaaagcgcgcgggtgggagattacgcgttaactgaaatgcccggtggcgctaacgcttatccggcctacagcatctgtacctgtaggcccggtaagcgcagcgccaccgggcaaaagaatgagatttactctttcggatctttccccgccagcagcttatccagctcatcgccgccgacgtgacggaaatcctgccccttcacgaagtagaagatgtattcgcagatattctggcaacggtcaccgatacgctcgatagagcgcgcgcagaataacgcggtcagcacgctgggaatggtgcgcgagtcttccatcatgtaggtcatcagctgacgcacgataccttcgtactcctggtcaactttcttgtcttcacggtagatacgcaccgcttcgtcgagatccatgcgcgcgaacgcatccagcacgtcgtgtagcatctgcacggtgtggcggcccagtgactccagactcaccagcagcggctgatgctgctgggagaatttctccagcgcggtacggcagattttatccgccacgtcgccaatgcgctccagttcggcgatggttttgataatcgccatcaccagacgcagatcgctcgccgtcggctggcgcttggcgataatacgcacgcaggcttcatcgatggcgacttccatcatattaacctgatgatcgccttctaccacgcgcttcgccagctcgctgtcctggttgtgcatggcggtgatagcgtcagaaagctgctgctccaccatgccgcccatggtcattacctgagtgcggatgctttccagttcggcgttgaactggccggaaatatgtttattaaggttcagactgtccattacgcactcctgaattaaccgtaacgaccggtgatatagtcttctgtttgtttcttcgcgggcttggtgaacagatcgtccgtgttgctgaactcaatcaactcgcccaggtacataaacgccgtatgatcggagcaacgtgccgcctgctgcatgttgtgggtcacgatcaccacggtgtaatcctgtttcagctcggtgatcagctcttcaatacgcccggtagagatcgggtccagagctgaacatggctcatccagcagcagcacttccgggcgaatggcgataccgcgcgcaatgcacagacgctgctgctgaccaccggagagagagtacccgctctggtgcaatttatctttggtttcgttccataatgcggctttggtcaacgcccactgcacgcgctcgtccatatcggcgcgagacagcttctcaaacagacgcacgccaaaggcgatattgtcatagatggacatcgggaacggcgtcggcttctggaataccatccccacttttgcgcgcagcagcgcgatatcctgggtgttggtgagaatattgtcgccatccagcagaatttcaccttccgcgcgctgctccggataaagcgaatacattttattgaaggtacgcagtagcgttgatttaccgcagccggatggcccgataaatgccgttacctgattcttcgcgatatccagattaatgttcttcagggcatggaatttgccgtagtagaagttcaaatcacgaacctgaatcttactcggggcagtttcaaccatactcatttcactcttttcctcatccagcgccgcatccgccacgccgtaaaataatgcctgatggcgctacgcttatcaggcctacaatgtctttaaccgtgttttttcttcgcgaaaacaacacgcgccagaatattcagcagcagtacgcacagggtaataatcagcacgcccgcccaggctaattgttgccattcggcaaacgggctcatcgcgaatttaaaaatggtcaccggcaggttggcgatcggctgcatcatgtcggtgctccagaactggttggagagcgcggtaaacaacaatggcgccgtttcgccggcaatacgcgcaatagccagcaggataccggtcataatgccggagatagaggctttcagcgtaatcgcggaaatcatcttccacttcggcgtacccagcgcataagcggcttcacgcaggctatccggcaccaatttgagcatgttttcagtggtacggataacgatcggtacctgcaacagcgccagcgcaatcacccctgcccagccggagaagtgctgcatctgcgccaccacgatggtgtaaacaaacagccccacaacaattgacggcgcggaaagcagaatgtcgttaataaagcgaatgatttccgccagccaggatttacggccatattccgccagatagatcccggccataatccccagcggcgtacccaatacggtagcccagagaatcaataatccactccccgccagggcgttcgccagcccgccgcccgccgtgttcggcggcggcgtcatttcggtaaacagcgccagcgacatcccgtcgataccacgcgtgatggtggacatcaaaatccagatcagccagaacaggccaaatgccatcgtcgccattgagagcgttagtgcgatacggttcttcatgcggcgacgcgcctgcatcttgcgacgggattccgcgagctgcgcggtgttctgcatatcaagcgtagccattaacgtgctccctcgttcttcgccagacgcataatcatgaacttagacgccgccaggacgataaaggtgatcacaaacaggatcagccccagctccatcaacgctgccacgtgcaggcccgattccgcctcagcgaattcgttcgccagcgcggaagtgatgctgttgcccggcatatacagcgacgcgctgtcgagctggtaagtgttgccgatgataaaagtgaccgccatcgtttcacccagagcacggcccagccccagcataatgccgccgatcacgccatttttggtgaacggtagcacgatgcgccagataacttcccaggtagtacagccgataccgtaagcggactctttcatcattaccggtgtttgctcgaagacgtcgcgcataaccgccgcaatgtaggggatgatcatgatggcgaggatgacgcccgccgccagaatgccgataccaaaggccgggccggagaacagcgcgccgacaaacggaatgttggaaagaatattgccgaccggctcctggaagtacgtcgcaaacagcggcgcgaagataaacagcccccacatgccgtacacgatactgggaattgccgccagcagttcaatggcgatgccgagcggacgctttagccagcctggcgccagctcggttaaaaacagggcaatgccgaaactgaccggaacggcgatcagcagtgcgataaaggaggtcaccagcgtgccataaatgggcaccagagcgccgtagatatcgtttggcgcgtcccattccttagtccaaagaaatgagaaaccaaatttctgaatacttggccaggaggagatgatcaatgagacgataataccgcccaacatcaatagcacaatcagcgcagccagttttaccagcgcgctgaaaatcatgtcgccttttttacccggcgggttaaaagcaggcttggttgcagccataaattactctttccattaaacgcattttacgacgttgcccctgccggatggcgctacgcttatccggcctacaacgtgggcctgcggtcgaaaccgtagggcggataagcgtagcgccatccgccaattcgttaattaatacagcgccttaccgttgctgtcttttatactggtcttccatgcagcacgaacctgctcaacaacgttatccggcaggctggcgtagtccagatcattcgcctgcttagcgccatttttgtaggcccagtcgaagaacttcaacacttcagcaccctgctcaggtttcttctgcgctttgtggaccaggataaacgtggtggaagtgattggccacacatcgtcacctttctggttggtcagatcctgcgcgaaggttttgctccagtctgcgcctttcgccgcattagagaagctctcttccgtcgggcttaccggtttgccgtcggcagaaaccaatttggtgtaggccaggttgttctgcttggcgtaagcgtattcaacgtagccgatagcgcctggcagacgctgtacaaatgccgcgatgccgtcgttacctttaccgcccagaccggttggccagttcacggtagaacccgcgcccactttcgatttccactcgtcgttgactttcgccaggtaactggtgaacacgaaggaggtaccggaaccgtcagcgcgacgcaccacagcgatgttctgagaaggcagcttcacgcctgggttcagtttggtgatggcttcatcatcccacttcttgattttaccgaggtagatgtcacccagcgttttaccatccagcaccagttcgccggatttgaggcctggaatattcaccgccagcaccacgccgccgatcaccgtcgggaactggaacaggccttcctgattcagtttttcgtcagacagcggcgcatcggaagcgccaaaatcaacggtattcgcggtgatttgtttcacgccgccggaagagcctatcccctggtaattgactttgttaccggtttctttctggtaggtatccgcccatttggcatacaccggcgcaggaaacgttgcaccggcacctgtcaggcttgctgctgcaaaggcagagaacgcgctcatcgataaggtcgcggcgacaacagttgcgacagtggtacgcataactttcataatgtctcctgcacggtttcggtaaatcgttgtttgagttgctacgatgagcaaaataggacaaattgatgacagttatatgtcttgattatgacggtttgatgacaatggaaataaaaaaagctggcccggggagacaccagaccagcctgcagggggagatgaattagactgtttgcgcaaccgcagacggtttcaacagcgcgtacatcaggccgcagacaatcgtgcccagggcaatcgagagcagatattgcatcacatgttctaccgcatgcgggatcgccaggacaaagaggccaccgtgtggcgccatcagtgtacaaccgaaatacatggacagtcccccggcgattgcgccaccgaccatcgtggaagggatgacgcgcatcgggtcacgcgcggcgaagggaatcgccccttcagagataaagcacagccccagaataaaagatgcattacccgcttcatgctcagcggcattgaatttcgctctggccgcccaggttgcgacgcccattcctaatgccggtaccatccctgccgccataatggccgccatcggcatataggaatgagaagccagtaaaccgacgccgaaggtatacgcagctttattcaccggcccaccaaggtcaaaaccttgcattgcgcccagcaacattcccagcaagatagcattcgtagaggtcatattccccaggaacgtcgtcagcccttccatcaccgcagacaccgggccacccaccacgtaaatcatgattaggccggtaatcagcgtagacagtagcggcagaaccagcacaggcttaagcgcttccattgacgctggtagcttaatattttgcgccagaaaccgtacgctgtaaccggccagaaaaccggccacaatccctcccaggaaaccggcgccgcacaggctggccaacatcccgccaataagccccggggccagacccggacgatcggcaattgagaaggcaataaacccagccagtaccggcaccatcagcgcaaaggccgccttaccaccgatttgaaataacgcagccgccagcgtgcccggctcgttgaaggcctggataccgaagacaaaagagagtgcgatacacaatcctcccgccaccaccaaaggaagcatatgggatacgccggtcattaaatgcttataaacgccgggtagctctgttttaccagctgaagaagagcgcccggcactcccctgatagacctcggcgctattgaaagcattatccatttcctgcgcactcttttttagcgccgcgccggtactggtgcgatagagtcttttgccaacaaagcctgacagatccagctcaatatccgccgcgataatcaccacatccgcctgcgctatctcttccgcggtcagcgtgttcttcgccccgacggaaccgcgggtttcaaccttgatccagtcaccacgcttgcgggcttcaatttccaacgcttctgccgccataaaggtatgggcgacgcccgtcggacaggccgtcacagcaacaatttttttagtcatagtagggtaccctgttcttttaatttaaagaaaaagcgggaaaaaatgttacaggcgtgaccaggccgctgctttctggaacagcgcgtcatccgggcgaatcccggtataaaggacaaattgctccacggcctgaatagcaaacacttcggaaccggtaatcacggttttaccgcgttcacgggcgtagcggattagcggcgtgacgggcggtagcgccaccacatcaaagataacgctcgccttatccacttcctgttcggaataagaaagtttgtcggcatcattaccgccagccattccgataggcgtggcgttaattaacaaatcagcttcaataccgtcggtatccgggcgccattcatagccatagagttcggccagttgtttacctgacgcttcatcaatcgcgacaatataaccacgggtaaaccccgcatccttcagcgcgcaggccaccgcctttgccataccaccgctgccacgcaaagcaaacaccaggtcgggagagaccttgtaattcgccagcaagcgagctattgcaatgtaatcggtgttgtacgccttcagatggccattggtattcacaatggtattaactgagtgaatggcctgagcggaagcatccagttcatccaccagcggaatgcaggcttctttaaacggcatagagatcgcgcatccacggatccccaacccgcgcacgccgctaatggcctgcgtaagatcggtcggcgaaaaagctttgtagagataattgagatccagcgcttcgtacagatagttgtgaaagcgtgtaccgaagttacttgggcgtgccgccagggacatgcagacctgagtgtctttattaatgcgctttgtcatgatgaatcctcatagaagttgcgatagagaaaatcatcggctaaaaaggggatattaaaaattgctcattcccgttcgggaaatttcaccttttatgacaacccggcacactgaacaaaaatacttaaagctactccagcactatggcgacaagcctgttagcgtgacattacaggagctggcggatgtgttgttctgcacccgacggcatatgcgtaatctgttgcttcagatgcaggaggcaaagtggctcatctggcaatcacaggccggacgtgggcatcgcgcccggcttcacctgcgctataaaccagaacagctgttaagcgaaaaggcggagcagttactggagtctggtcatattgatcaggccattcagctgctgggtaaaaataagcaccaggtggcgcaactgctgcgttcaaagctgggctatagcgtgcgggcagactatcagcggctgtgcatcccctattatcggacaatgccgtcgctgtgccccggcataccgttgcgtcgctctgagcagcatctggtcaggcagatttttagcggcctgacgcgcataaatgaggaaaaaggtgaagtcgaagccgatcttgcccaccactggcggcagattgatccactgcgctggcgtttttatctgcgccccgccgtcctctggcatgatggtcaggagctgacgatcgacgcggttatcgcttcactgacccgcagcgctaagctgccgttgttctcgcacttgcagaccattcaggccaccgggccgctgagccttgaaattacgctggcgcacccggataaccgactgccgctgctgctcagccatattgatgccatgatcctaccgcctgaccatacacaacgcgctgatttcccggcacatcctgtggggactggcccttatgaggtggtggaaaacaatggctttcatctacaaatgaaggcctttgaccactatttcggtctgcgcgggctgctggatgaagtggaggtctttatctggccgaatttaacggagacagacaacctggcggaatcgctgtcggataacgacacggcagcctggctcagctccagcctgagcgatgaggattacgtttccggacggcttagccaggtatcaggcaaaccttctgacaacctgcgcgagatgtttcttgagcgtggaggatattttttattatgcgacagccgctccccgcactggcataccgccgaacatcgccgctggctacgggaaacactcagcccttacgccatactccagcatctgagtgaggcaattcgccccttctgggtaccgggcggcagcctgctgtcctcctggtttcatactattgaggcgggcccggcctgttcaccttttatctcgtcgtcgccctacgcaaaactgcgtctggcctatcacgatcagcaccctgaatttccaatgctcctggatatcatgcaagagatcatgcgccagcagggcattttacttgagggcgttgagctgaattatgatgactgggcgaatggcaaagccaatgtggatctctggctggggacggtcaatttccccattcccgaagagtggaacgtcggtacatggctactgggctcccctttactgcgccacgccatcagtggtggggatgatgcgctgctggcccaatgggaaacccagtggcatgccgaaaccatcagcgcggaacaactggtcagggaaaccacccgttcaggctggctacagccgctttttcaccactggatgcgactcaaaagccccgaccgggccagggggatccacctgaataacctggggtggtttgatttccgatccacctggattgagccagggccttaaagaagagaatgtgaccgggtgcccgtagcgcaggcaggcgtagcacctcttagtcgctcttcagccaccatagagaaagaacagcgcctgtcacagcgcacaaaaaaaggccgtctgtcgacggccttctgcctggtactacatttgtacttactctacggtaaccgatttcgccaggttacgcggctggtcaacgtcggtgcctttaatcagcgccacgtgatacgccagcagttgcagcggaacggtgtagaagataggcgcaatgacctcttccacatgcggcatctcgatgatgtgcatgttgtcgttgctgacgaaacccgcatcctgatcggcgaagacgtacaactgaccgccacgtgcgcgaacttcttcgatgttggatttcagtttctccagcagttcgttgttcggcgccaccacaatcaccggcatatcggcgtcaatcagcgccaacggcccgtgtttcagctcgcctgcagcataggcttccgcgtgaatgtaagagatctctttcagcttcagcgcgccttcgagcgcaatcggatattgatcgccacgccccaggaatagcgcgtgatgcttgtcggagaaatcttctgcaagcagctcgatgcgtttgtcctgcgacagcatctgctcaatacggctcggcagcgcctgtaggccatgaacgatatcatgctcaatggacgcatccagacctttcaggcgagacagtttcgccaccagcatcaacagcacggttaactgggtggtgaaggctttggtagatgctacgccaatttccgtacccgcgttggtcatcagcgccagatcggattcacgcaccagcgaagagcccggcacgttacaaattgccagagagcccaaatatcccagctctttcgacagacgcaggccagccagggtatctgcggtttcgccagactgtgacagggtgatcatcaggctgttacggcgcacggcagatttgcgataacggaattcagaggcgatttcaacgtcgcacggaatacctgccagcgattcaaaccagtaacgggaaaccataccggagttgtaagacgtaccgcaggcgaggatctgaatatgctcaaccttcgacagcagttcgtcggcgttcggtcccagctcgcttaaatccacctgaccgtggctgatgcgcccggtaagggtgtttttgatcgcgttcggctgttcgtagatctctttctgcatgtagtggcggtaaatacctttatcgcccgcgtcatattgcagattggattcgatatcctgacgttttacttccgcgccggtgttatcgaagatatttaccgaacggcgagtgatttcagcgatatcgccctcttcaaggaagataaagcgacgagtcactggcaacagcgccagctggtcagaagcgataaagttttcgcccatacccaggccaatcaccagcgggctaccagaacgtgccgccagtagggtatccgggtgacgggtatccataattaccgtaccatatgcgccacgcagttgcgggatagcacgcagaacagcctcacgcagagtaccgccctgtttcagttcccagtttaccaggtgtgcaatcacttcggtgtcggtttcagaaacgaaggtatagccacgcgcttttaacgcttcacgcagcggttcatggttttcgatgatgccgttatgcaccaccacaatgtgttcagaaacatgcggatgcgcgttagcttctgaaggttcaccgtgcgtcgcccagcgagtgtgagcaataccagtgccgccatgcagaggatgttcttccgctgcctgagccagcatctggactttaccgaggcgacgcaggcgggtcatatgaccttctgcatccaccacggccagaccggcagagtcatatccgcggtattccagacgacgtaaaccttcgagaaggatttcagctacatcacgctgcgcgatagcgccaacaattccacacatagttttatttcctgattatggcattacgccatgcgttgtcgctgacctgtatgcccgtcgttgcgggcgccccgagccttgtagagagtggggttatttttataagtactgctcatggagcggaggattattttatcctctcatctccggtctgccggatggcgctgacgcttatccgacctacaaaatcactttttcttcaccggacgctgccagccttgcttatgcacctgcggcacgcggcttaataccagttcattgtcggctacattacgggtgacggtagtccctgcggcgatggtggcccctttaccaacagtaaccggcgccaccagttgggtatcggagccgacaaacacatcgtcgccaataaccgttttgaatttgttcgcgccatcatagttacaggtgatggtccccgcgccgatattcacgttgtcgccaatttccgcatcgcccaggtaggtcagatggccggctttagaacctttaccgagacgcgcttttttcatttcaacgaaattgccgacgtgagcgcccgctaacagctccgcgccgggacgcaggcgagcaaacggaccgatggtgcaggccgcttccagatgcgcatcttccaccacgctgtatgggctaatttcgcagtcatcgccaataacgctgtttttaataatgcagcccgcgccgatcttcacgcggtgaccgagcgttacataaccttcgatgataacgttagcgtcaatttccacatccattccacaatgaagggtgccgcgaagatcaaaacgtgccggatcgcgcaacataacaccggataacagcagtttctccgcctgttcggcctggtaaatacgctccagacgagaaagctgtagacggttattcacgccgtccgtttcgctgatgcgagccggatgcaccgcggcgatttctcgtccttcctgataagccagcgcaatgatatcagtgatgtaatattcaccctgcgcattattgttagtcagcttagacaaccaacgtttcatgtccgcgccgttggcgatcagaataccggtgttaatttcctgaatctgacgctgttcatcagtggcgtctttatgttcaacgatgccggtcactttaccgttttcacgcgtaatacggccatagccgctcggatcgtccagcttcacggttaataacccaataccaccctgcggtttggcatcgcgcaggcgctgtaaggtttcaaccgaaatcagcggcacgtcgccgtaaagcattaaaatatcttcatcgtcgctaaagaagggcgcggcctgctgcattgcgtgacctgttcccaactgttccgcctgaagcacccagttcagcttgtcatctttcagggtctgttttaacaactcgccaccgtggccatagaccagatgaacctgtgcggcccctaatttagtagctgcatcaatgacatgctgcaccatgggtttacccgccagcgtgtgcagcactttaggaatatcggaatacatgcgtgtgcctttacctgcggcaaggatcactacgctcatagcactatttaacatacgcgtcctgactgtaatttgagaacgaatttatactgtttcacgttgaaaatactacatttttttcatcgtaaaatggaagaaggataaaacgctcaccgggataaaatccccgcctgctaatgaatcattttcgttcattaccgcgcctcttgtctcctgaaaagtaaaaacacccgcgtattggcaacgtagtccgatgtttttgctgtttttttactccataaataaagaagataacgtaataaagcgcaggggagtcagaaaagcaaaaaccagcgacagaggccgctggttttccgttgcgcgtattttttacttaattacgcgacataaaaatccgcaaaatataccagaacatggtcgcgatagaagcaaacagatgtaatgccgcgccagcagggcgatcggtagggtaatggtgaataatgttagaagtatcgtaaagtataaacccggcgcacagcagtaccattagcgcagaaaaccagacgcccagcgagaagccgcagatgacgctggcaataatcgcgccaaaagcaatgaacccagccatagtcagaaacgagcgcagaaaagaaaagtctttttttatagaaaaagcggtaaacgtcaggccgccgaccagcaacagagtcgttattgccgccgcgccaatgctcgacgggttaatatacgccgccaccgttaacaggggggcaaaaatcagggattctgccaacacataaatccccagcccgataagttgcgtttgattattccccgcattatccgccagacgggtcgccagcattcccaccagcataaaagcgccgagaacaaccaaccagctatatcttccaccagccagcagcacatcaagcgcatactccccgacccctataaaactccacgccgcgctcaatacgataaaaccgacgatggcgacggcgagatgaagataagcacgacgaataaaggtagtacgatcaatccttgagtcgggttgtggacccgcaaaggatggctgaaatgacatagtaataatccctcattttatgcaataaaaacgcatccattcctcccttcttcgcacaatgtgcagatgccaatgacagaaagaaggatttaatgaaaacagcgctgtcgctgaaaacgcgtcgccttcagccgcttgtttttgtcgttgctagtttatcgaataaaaattgagaggataaaaaaaaaccagtccgcaatcagactggttttatgctttcaagccggtgttacatcgcttttttggtcaactcgataacgcgcagtttagcgatcgctttggccagttccgcagacgcctgagcgtaatccacgtcaccgtgcgagctcttaatgtgctcttcggctttacgcttcgcttccagggctcgcgcttcgtcgagatcctgaccgcgaatcgcggtatccgccagaacggtcacgctgccaggctgcacttccagaatgccgccggacagatagataaactcttcatgaccgtgctgcttaacgatgcgaatcataccaggcttaatggcggtgagtagcggcgcgtgccccgggtaaatccccagttcgccttcgctacccgtaacctggattttctcgaccagaccggagaacatttgttgctccgcgctgacgacatccaggtggtaagtcattgccatatcaccctccgattaaggcgttaaagttttttggctttttccacggcttcgtcgatggaaccgaccatgtagaacgcctgctccggcaggtgatcgtattcgccttccatgatgcctttaaagccacggatggtgtctttcagggagacgtatttgcccggagaaccggtaaatacttccgccacgaagaacggctgggacaggaagcgctgaattttacgcgcgcgagctaccaccagtttatcttcttcagacagttcatccataccgaggatggcgatgatgtctttcagttcctgataacgctgcaggatggactgaacgccacgcgcggtgtcgtagtgttcctgaccaacaaccagcggatccagctgacggctggtggagtccagcgggtcaacggccgggtagatacccagggatgcgatctgacggctcagtaccacggttgcatctaagtgcgcaaaggtggtggctggagacgggtcagtcaagtcatccgccggtacgtataccgcctgtacggaggtgatagaaccggttttggtggaggtgatacgttcctgcagaacgcccatctcttccgccagagtcggctggtaacctactgcggaaggcatacggcccagcagtgcggatacttccgtaccggccagggtgtaacgatagatgttatcgacgaacagcagtacgtcacgaccttcgtcacggaatttctccgccatggtcagaccggtcaatgcaacgcgcagacggtttcccggcggctcgttcatctggccatacaccagggatactttatcgataacgttggagtcggtcatttcgtggtagaagtcgttaccctcacgagtacgttcccctacgcccgcaaacactgagtaaccggagtgctcgatcgcgatgttacggataagctccatcatgtttacggttttacctacacccgcaccaccgaacagaccgactttaccgcccttcgcgaacggacacatcaggtcgataactttgataccggtttccagcagttcctgagagtttgacaactcttcgtaggaaggcgctgcgcggtgaatcgcccaacgctcttcttcgccgatctcgcctttcatgtcgaccggttcgcccaggacgttcatgatacgacccagcgtagctttacctaccgggacttcgatcgggtgttcgagatcttttacatccagaccgcgacgcagaccgtcagaagaccccatcgcgatggtacgcacaataccgccgccaagctgctgctgaacttccagcaccagcttctcattaccattctgcacctcaagggcatcgtacacgcgtggtacggcatcctgagggaactcgacgtcgaccacggcgccgattacctggacaatctttccagtagccatcttaaatcctctacgaaataacctggttaaaccgcggcggcccccgagacgatctcggtgagttcctgagtaatgctggcctgacgagctttgttgtataccaactgcagctctttaatcaggctgccgccattatcggttgcggctttcatcgccaccattcgtgcggcctgctcgctggccaggttttctaccacgccctgataaacctgagactccacataacgacgcaggagagtatccagcagcgctttcgggtctggttcatacaggtaatcccaggctttacgcttcagatcatcatcttctgacgccggcagcggcagcagttgagtgatcgtcggcacctgagacatggtgttaataaatttgttgctgacaatgtaaagcttgtccagacggccttcgtcgtaggcctgcaacatcactttaaccggaccgatcagttcggacagagaagggttatcccccatacctgtcacctgagcgacaacgttgccgcctacggaattaaagaatgacacgcccttagagccgatcattgcgagttcgcactgaacgcctttatcggaccatgccttcatatccgccagcagctttttgaacaggttaatgttcaagccaccgcacaaaccacggtcggtcgacactaccaggtagcccacgcgtttaacgtcgcgctcttccaggtaggggtgcttatattccagattaccgttcgcaaggtgaccaatcactttgcgcatggtctctgcataaggacggctggccgccatgcgatcctgcgatttacgcattttggaagcggcgaccatctccatcgctttagtgatcttttgcgtgttctggacgcttgcgatcttactacgtatctcttttgcgccggccatgagcttctcctcaatgccttacggcctgccctaaggcaagccgccagacgttaccaggactgggttgctttgaaggaatcgaggatgcctttcagcttgccttcgatttcgtcgttatagccaccggactggttgatctcttgcatcagcggagcgtgatcacggtcgacgtaagccagcagtgcggcttcgaagctaccgattttcgccagttcgacatccgccagataaccacgttctgctgcgaacagaaccagagactgctgcgcgacggacatcggcgcatactgtttctgtttcagcagttcggtcactttctgaccgtggtcaagctgtttacgggtggcatcgtcaaggtcggatgcaaactgagagaacgccgccagttcacgatactgcgccagcgcggtacgaataccaccggacagttttttcatgatcttggtctgggctgcgccacctacacgggataccgagatacccgggttaaccgcaggacggataccggcgttaaacaggttagattccaggaagatctgaccatcggtaatggaaattacgttggtcggaacgaacgcggaaacgtcacctgcctgcgtttcgataatcggcagcgcagtcagtgaaccggttttccctttcacttcacctttagtgaaggcttcgacgtagtcggcgttaacacgcgcagcacgctccagcagacgagagtggaggtagaatacgtcgcccgggaatgcttcacgtcctggcggacgacggagcagcagggagatctgacggtaagcaacagcctgtttagacaggtcatcgtaaatgatcagcgcatcttcgccgcggtcacggaagtattcgcccattgcgcaaccggcatacggcgccagatattgcagcgcagcggattcggacgcggtcgccaccacaacaatggtgttagccagcgcgccgtgctcttccagtttacgcaccacgttagagatggtggacgctttctggccgatagcgacatagatacatttgatgccggagtcgcgctggttgatgatggcgtcgatagccagcgcggttttaccggtctgacggtcaccgatgatcagttcacgctgaccacgaccgattgggatcatggagtcaacggctttatagccggtctgcaccggctgatcgacagactgacgatcgataacgcccggcgcaatcgcttcaacggcagagaagccgtcattatcaaccggacctttaccgtcaattggcgcacccagggtgtttaccacacgtcccagcaggccgcggccaaccggaacttccaggatacgacccgtacatttaaccttcatgccttcggcaaggtcagcgtatggacccatgactaccgcacccacggagtcgcgctccaggttcagtgcgatagcgtaacggttacccggcagggagatcatttcaccctgcatacaatcggccaggccgtgaatgcggataacaccgtcactgacagaaacaatagtaccttcgttgtgagcttcgctcaccacattgaactgagcaatgcgctgcttgatcagttcgctgatttcggtggaattcagttgcatgctccagtccccttaagactgcaagacgtctgcaaggcgctcaagacggccgcgtacgctgccatcaatgaccatatcacccgcccggatgataacgcctgccattacagacttatcgattttgcaattcagcttcactttgcgtgacagacgtttttccatcgcggcgctgattttcgaaagctgctcttcactcaatgcggttgccgacgtaacttctacctcggaggtagcttcactggcggcacgcagatgaataaactgctccagaacatccgggagcgcgttcagacgattattttcagccatcacccgaatcaggttctgaccgttttcgtctaactgctcaccgcagactgcgataaacgactcagcgagcgtttccggcgccagcgcgccagagagaagctctgccatttgttcgttcttggttacctcggcggcaaacgccagcatatcctgccagcgctctacactttggtgttcaacggcaaagtcaaaagctgctttggcgtaggggcgagctaccgtaacaaattcagacatcagcccctccctccttacagttcagcgacaagtttatccacgatgtcgctgttagcagcttcatccacggaacgttcgatgatcttctcggcgccagcaacagctaggatagcaacttgcttacgcagctcttcacgggcgcgtttacgctcggcttcaatttccgcctgcgcctgcgccacgattttagtacgttcctgctctgcttcagttttggcttcgtccaggatctgagcgcggcgtttgtttgcctgctcgatgattacctgagcttccgctttcgcttttttcagctggtcggtcgcgctggcctttgcaaggtcaagatccttatgtgctcgttcagcagaagcgagaccgtcagcaatttctttctgacgtttctcgatggctgccattaacggcggccatacgtacttcatgcaaaaccagacaaagagaataaacgcgatggcctggccgaggattgttgcgttaagattcacagcacaatgcctctatctagttaaccttctgatattgctcttaattcaagcaacgcttactacgcgacagcgaacatcacgtacagacccagacctacagcgatcatcgggatagcatccaccagacccataacgataaagaactgagtacgcagcagaggaatcagatcaggttgacgcgccgcgccttccaggaatttacccccgaggatgccgataccgatcgcagcaccgattgccgccagacccatcatcacagcggcagccatgtacagcagatccatattcaggttttccatgacagtctccagtttgtttcagttaaaacgtagtagtgttggtaaattaatgctcttcggacgccatcgacagatagacaatcgtcagaaccatgaaaatgaaggcttgcagcgtaataatcaggatgtggaaaatggcccacggcacattcagaatccactgtgaccaccacggcaacagaccagcaatcagaatgaaaatcagctcaccggcatacatgttgccgaacagtcgcagaccgagagaaaccggtttggacagcagacttaccccttcaaggattaagttgacaggaatgaacgcccagtgattgaacggctgcagcgtcaactcttttgcgaagccgccgatgcctttcattttgatgctgtagaacagaataaggatgaatacgcccagcgccatcgacagggtgatgttgacgtcagcagacggcaccacgcgcgttgccggcagacccagccaatgctcagcgatatacggcagcaggtcgataggcagtaagtccatcaggttcataaggaatacccagacgaaaatcgtcagggccagcggcgcaatcagcttgcttttgccatggtacatgtctttgacgctgccatgcacaaagccgactatcagctcaatcgcggtctgaaacttgcctggcacgccgctggtcgcttttttagcaacgctacggaacatcaccagaaacaacagacccagcaccaccgagaagaacatggagtcaatattgagcgtccagaaggtggctggggggttctgcggatccaccagcgagaaagtacgcaggtccaactgaaggttattcagatggtgtcctatgtattcctgcggcgtcatattttctgaagccatgatgccttttaccctttgttgttaattacagccggcgccagtatctgaaccaccagcaccaaaacccacgtaacgatcagcggcaaaaacaccgcctttaaaaccgccaacgccaccaccagtaaaaccagcatcgctaacaccttgaaggcttcaccgaaggcgaaagtccaggacacgcggcccttagcaggtgtatgcgcctggtgacgccaggcaaatatcataaacaacatattaggcagtgccactgccaatcccccacatactgcggagatgccccagaaggggtctttgaggcaaaacagcaatccacttgctattaccgccagaaactgaatgaacagaagcttacgagcaacgtttcgactcacgagcgacacagacatcacgtttttactcctgctcacttcgaggtatgccgcgtgtcgtataaaacgttctttaagacttagagtcaagcatcaaaaagcggtcaaattatacggtgcgcccccgtgatttcaaacaataagtagccaaaaggtgaataaatgtttaaatatttttctctggcccgcatttttaacttttagccaaagtgtgaacgatcgtacaaaactgcaaatagcgcgaaaacactggcgataaagcgtgcaccagatcacacattaaacatattcatgcttacgcaattcatttacgtgtcaattcatgccttttcatctttttgatatttaagcgtaaaaccaggtactgttttaaaaataccagcttacaccttaaaaacgccccattgacatttataataaaaatttaacaagcaaaagtgatttttcgattcgatttttagcagactgatatttacaaagttgattactctctgttttaacaaaagaagcgacgttgtcatgttgaaacgaaaccgtaaatccagagttaaatgtaacaacgctgaaatgcgttatacctgtcgatttttaacacaagccgcgtcgttttttttctattttttttgataaaaattaaactttgtttgacttaataatcaccagatgccgctcgccttccagttgcggaacgcgtaatttttcaacagattcgacgctaaaattgtcaggtagtgaggcaatttcatcccctggcaattgcccttttaaggcataaaaacgccctttctctcccggcagatggtggcaccagctcaccatatcattcaacgatgcgaaagcgcggctgataacgccatcaaacggcggttcggagggataggcttcaacgcggctttgaaccggcgtgatgttttccagtttcagttcgtgctggacctgacgcagaaaacgtacccgcttgcccaggctgtcgagtaaggtgaaatgcgcgtcagggagaacaatagccagcgggatgcccggcagccccggtcctgttcctacgtcgataaaacgctgtccctgaagatacggcgcaacgactatgctgtcgagaatatggcgtaccaacatttcgttgggatcccgcactgacgtcaggttgtatgctttgttccatttgtgcagcatatcaacgtaggcgaccagcagcgttttctggtgatcggtaagagaaataccggcatcagccagcagacgagagagtttgttgagcacggtcattacctgttaataatcaaatgcccgatgcgctttcgcttatcgggcctacaaatttgtagggcgggcaagcgaagcgcccccgccaaattagtgttatcaagcgctacgacgcagcataccttgttttttcagccataccagcagaatggagattgccgctggcgtaacgccggagatacgcgatgcctggccgatagacgccggtttatgatcgttcagcttggcgataacttcgttcgacagaccggaaacctgacgataatccagcgtggcaggtagcaacgtattctcgttacgtagttgtttttcaatctcatcctgctggcgagcgatatagccttcgtatttgacctggatttccacctgctcagcggcttgctcatcttcaagcgcaggcgcgaatgcggcaagcgaagtgagctgcgcgtaggtcatttccggacgacgcaacagatcttcgccgctggcctcacgggagagaggcgtggtcaaatgcgcattcacttcatcggcggattccgcagacggcgttacccatgtcgatttcagccgctgacgttcgcgttcgatattttccagcttctcgttgaagcgcgcccagcgttcatcatccaccagacccagctcgcggcccatttcagtcagacgcagatcggcattgtcctcacgtagcatcagacgatattcggcacgggaggtaaacatgcgatacggctctttggtgcccagcgtacagagatcgtccaccagcacgccgagataagcctgagaacgcgcaggcgcccagccctctttgtcggcggaaagacgcgcggcattcagaccagcgagcaagccctgcgccgcagcctcttcatagccggtagtaccgttgatttgaccagcaaagaacaggccgtgaataaatttactttccagagtcggtttcagatcgcgcgggtcgaagaaatcgtactcaatcgcgtaaccagggcgaacgatcttcgcgttctccataccctgcatggaacggacaatctgcatctgcacgtcaaacggcaggctggtggagataccgttagggtaaatctcgttagaggtcagtccttccggctcaaggaagatctgatgctggttacgatcggcaaaacgcatcaccttgtcttcgatcgaaggacagtagcgtgggccgatcccttcgatcacgccagcgtacattgggctacgatcgaggttattacgaatcacgtcatgggttttctcattggtatgcgtgatgtaacacggcacctgttgcggatgctgagaagcattccccataaacgagaaaaccggcatcgggttatcgccatgctgttgagccaacacgctgaaatcgatagtacgcgcatcaatacgcggcggtgtgccggttttcaggcggctgacgcgtagcggaagctcacgcagacggcgagacagcgggatggatggcggatcgccagcacgaccgccgctgtagttatccagaccaatatgaattttgccatccaggaaggttccgacggtcagtaccaccgctttcgcgcggaatttgagccccatttgggtcacggcgccgacaacgcgatcgttttcgacaatcagatcttcaacagcttgctggaagatcatcagattcggctgattctccagcgcggtacgcaccgcctggcggtataagactcgatccgcctgagcccgggtagcgcgaacggccggacctttgctggcgtttagtatcctaaactgaatacctgcctgatcgatcgctttcgccatcagaccgccgagcgcatccacctcttttaccagatgtccctttccaataccgccgatcgccgggttgcagctcatctgtcccaacgtgtcaatattgtgtgtcaaaagcagagtctgttgacccatacgcgctgcggccatcgcggcctcagtgcctgcatgacccccgccaataataatgacgtcaaaaggatcctgataaaacatggtaattgcctcgcataacgcggtgtgaaaatggattgaagcccgggcggtggattctactcaactttagccgatggagaaagccccgggatccgggctattaaaaagaagatctttttatttagagatctgttctattgtgatctcttattaggatcgcgccaggctgtggataacccggatcctgtaataaagatcaatgcgttggaaaggatcactagctgtgaatgatcggtgatcgtggtccgtataagctgggatcaaaacgggtacttatacacaactcaaaaagtgaacaacggttattctttggataactaccggttgatccaagctttccaccagatttatccacaatggatcgcacgatctttacatttatttgagtaaattaatccaggatccgagccaaatctccgctggatcttccggaatctcatgttcaaggatgttgatcttcagtgtttccccaacctgttttgcgccagcgcctttcagttccgcttctattttctcaatcgcgccgcaaaacgtgtcgtattctcgactgccaatgccaattgcgccgaaacgtaccgcggaaagatcgggtttctgcgtctgaaggtcttcatagaaaggggtcaggttgtccggaatgtctccggcaccgtgcgttgagctgattatcagccagatcccggaagttgacagatcctctaataacggaccgtgcaccgtttcggttgaaaaaccggcagcttccagcttttccgccagatgttccgcgacgtattcggcgccgcccagggtgctgccgctgataagagtaatgtctgccattgatcgctcgctcaggtaaagaggctgcattgtactctgtgaacgagctgggatctacctgtggaaaaatgtgggattaaaaaagccgatcatggcttgatggtgcgcatgatcgggttctgcaagacgatcagtgtctcagtggactgaatttcatcaattgtttggatcttgttgataagtacgtgctgaagcgcgtcgattgatttgcacatcacttttataaagatgctgtagtgaccggtggtgtaatacgcttccgtcacctcatccaggctttccagccgggccagtgcggagggatagtctttggcgcttttgaggatgatgccaataaagcagcccacatcgtagcccagttgtttagggctgacgtcaatccgtgcgcccgtaatgatcccggcctgcttcattttctcgacgcgaacgtgaatggttccagggctaacgccaaattgtttggccagttcggcgtaggcggtgcgggcatttcccattaaggcgtcaagtatgccgcggtccagattgtcgatctgataattttccatcgctttttcttatgcagattaatgattatctctattttagccattatttttaacgaatcaaaaccgaagttagctttttatctgttgattattgaatagtgctctcgttttgttgcttaatcataggcaacaggacgcaggagtaaaaaaatgaaaaccgcttacattgccaaacaacgtcaaattagcttcgtgaaatcacatttctctcgccagctggaggagcgtctgggtctgattgaggtccaggcgccgatcctgagtcgcgtaggggatggtacgcaggataatttgtccggctgtgaaaaagcggtgcaggtaaaagtgaaagcattgcctgacgcccagttcgaagtggtgcattcactggcgaagtggaaacgtcaaaccctggggcaacatgacttcagcgcgggcgaagggctgtacacgcacatgaaagcccttcgccccgatgaagaccgactctctccgctccactcggtctatgtggatcagtgggactgggagcgtgtcatgggcgatggcgagcgccaattttccaccctgaaaagcacagtagaggctatatgggcaggaattaaggcgacggaagcagaagtgcataaacagtttggtctggcgccgttcctgccagagcaaattcagtttgttcacagtcaggaactgctggcgcgtttcccggatctggatgcgaaagggcgcgaacgcgcgatcgccaaagaacttggcgccgttttcctggtggggatcggcggtaaactgagcgatggccaccgccatgatgtacgcgcgccggattatgatgactggagctccgcatctgagctgggctacgccggtctgaacggcgatatcctggtgtggaacccggtgctggaagatgcgtttgagctttcctctatgggtatccgcgtagatgccgatacgctgatgcgccagctggcgttgaccggtgatgaagatcgtctgcaactggagtggcatcaggcgctgctgcgcggcgaaatgccgcagaccatcggcggcgggattgggcagtcgcgtctgacgatgttgctgctgcaattgccgcatattggtcaggtacagtgcggcgtatggcccgcgcaggttcgcgaaagcattcctgctattttataagccgttagcgccgccagcgtctcagcaggcggcttcgcatcccggtgtcaaagcgccagatatgatcgaaaatgcgcatgatgccgggtttgccgtgcgccgacatcgccaccgcatggaatcgatgctggtgaagacgctgcaactctcccactttgctcaccacgtcatccggcaagcgctgggcgataaaatccgaaatgaccaccgcatcggcatcaaaccattcccgtccctgcattctttcaataatggcgcgaaaacagctggcgatatccgtgccgccgcgaaaacgttgacttaaaaagcggatggcctgctcgataccttccgggccggagagttcatagcgcacaacgtcagtggaaaacagcataataaagcagcggcggttatccgccagcgcaacgcgcatcaacgccaggcagaacgcttttgcgcactgctcgttaaatcctcccatcgagcctgaagtatcgacgcagacaataaacggtccgcgcggctgctcgtcgacatcctggtgtactaccggccgttcggtcactttctcacgccacgcttcgccatgcaggcgataggtgaggagctgtttttccactaaccggcggtaaaattcatattccagctcggtgatgccgagcgtcgccagctctggcggcaacaggcgcagaatatcatcgccttgctgaataccgtcaacctgctccggcaccgttgcgggttcgcgtaccagtgtacgaaaggtttccatcggcgcgtcttttttcggtaccgatttggcttcccgcgaacgtcccagttgttccgccagttgcattagctccggctgggcggcgagaaattcgccgtattttacgatcagttgataatcaccacgtttaagctggcccgcgctcatatcccacaggcggcctgcggcattatcattttccgccagcgtcggttccagttgcccgctcagcgtcatccgttcctgaacgtcactcagcaactgctcgcgctcttcttccagtagttgttggtttaacgtggtggcctgcacgaccagacttaaccgccagcgttgcaaaaaaagcgtgtgtagcgcaggggtaaaggtactgttgctctccgtcaactgcttcgcctgcgcggcatacggtgaatgcaggcggtgaagcaacgccagtatttgcggcagttgcacgatgaactgtggggtagagagaagttggctttgctgataacacatgacctcttccgtgagttccggcggaacgcgtgcgtctttaagacggctgcgtagcgcttcccgccagcgcgggagatcggcggtcacggcgttttttaaacgcggaaacttttcaaagaaaatgaccagttgtggggaagccagtagcgcgaggatcatctcttcgaccattccctcttcgctgacggccagcatggtatttagcgtatccagcgtcagcattgtttcgcctggcggatctgttctcctacatcctgcaggctggcctcaatgcgccctaaccagtcgctgtgaataaacaggcaatgttgctgttcgctgaagcgggtatgctgctggcgccagtcgttttctaacgtttccagctgctgtttgatctccgcaggcatactgtcttcagccgttcccggtaacgccagacgggtaccttgtagactgatgtcgcgcaccaccagatgttgagcgttatcgacttccatattcagcgtttgggcaaagccgatcccgttcagtttgccgcggatctcgccgcctttggtcagccaaagttccagcgcgctgcggtcaaaggtaatatggatcacttccatatcatgcaatttgagcggtttttgtagcaataacgtcaacgttgacgcactggcttccggcggtaaagtgtaatgcgggcgacggctgaacataccgccttctttaatgacggtgaaggcggttttatcgctttgctgttgctgcaactgaaggcgacgctggacgataccgccgaggcgagtcagcatggcctgctgctgccaggcgtgtccggtcatcaatatttccagttgctgttgcatgagattcagactctgcgcgtcataccacaagcaatcttttagcaggataaggtcaatcggcgcaaccgcgtcgcgtccgctaaagaaggcgctggcctgtaacaggcggatggctttcttccagcgacggtcggagacataaggcgcattcggcaaattatccagctgttggcgcagagtaaatatcagctcaaagaccggatcagggagtgaaatcgcgccgatatccttttgccactgttgatattcttcgtcgctaacctgtaacgaggcaggtaccgggttatcactttcatcctgctgactgaccagcatggagcggaaattggctttatcctgaactttatccagccacaggcgaatcaacattcggtcgtacaacgcttccaggctgctgtccgcttcgggcagttcgttagaggccgccaccagcagccgcatcggaattttttcctcaaatgcgccgttgcggaaatggcgttcgttaatggcggtcagcaatgtgttcaggatagctggcccggctttccagatttcatccagaaaaacgatttcggcttcgggaaggtagccggtcgttaagcgttcatagcgaccttcatctttcagcgcctgaatagagagcgggccaaaaacctcttccggcgtggaaaagcgtgtcatcagatattcaaaagcgcgggcgcgctggaaagcaaacttcaggcggcgggcaatcagactcttggcgataccgggcgggcccaacaaaaagacgctctcaccgcttaacgccgccagtaggcaaaggcgtatggcatgactacgttcatacagccccttctcaagggcgctgctcagacgggaaattctttccgctaataaatgtgggtgagccataataaagaggcgtcctttcgacaaatggatcatgctaattgcgagtatagacgtttcaccaccggggctgtaatcgtctgacgcgctgtttatttttctttgagccaggttaatctggcttcatttaggggtacgattttatgattaatcgtgcatactgtgcgcttttttgtgggccaagggactaagcacacatttcatatctatacactcattcattcaaactacatcaaggcggcaaaggagtgaatcccctggcactgacttaaacgtgtgactggggtaagcgaatgcagccgacaaggaggtagggtgaagggtgacgtgtataaacgaaagatgagtctatgagcactgataataagcaatcgttgcctgcgattaccctcgcagctattggggttgtctacggtgatattggtaccagcccgctttatacgcttcgtgaatgtttgtccggtcagtttggttttggcgttgaacgagatgccgtatttggttttctgtcgctgatcttctggctactcatctttgtggtttccatcaaatatctcaccttcgtgatgcgcgccgataacgcgggtgaaggtggaattttgacgctgatgtcgcttgccgggcgtaatacctcggcgcgcaccacatccatgttagttatcatgggactgataggcggcagctttttctatggcgaagtggtgattacgccggcgatttcggtgatgtcggcgattgaaggcctggagattgtcgcgccgcagctggatacctggattgtcccgctctccattattgtgctgactctgttgtttatgattcagaagcacggtacgggaatggtagggaaactctttgcgccgatcatgctgacctggtttttaatcctggcggtacttggcctgcgcagtattatcgccaatcccgaagtgttacatgcgctgaatcctgtctgggcggtacgttttttccttgaatataaaaccgtatcatttattgcgttgggcgcggtggtgctgtcgattaccggcgtagaggcgttgtacgccgatatgggacacttcggtaagttcccgattcgcctggcgtggtttaccgtggtattgccgtcgttagtactgaactactttggtcagggcgcattgctacttaagcatccggaagcgattaaaaaccccttcttcctgttggcgccggactgggcgttaattccgctgctgattctggccgcgctggcgacggtgatcgcctcccaggcggtcatttccggcgtcttttcgctgacgcgtcaggccgtgcgtcttggctatttgtcgccaatgcgcattatccatacctccgagatggagtccggtcagatctatatccctttcgttaactggctgctttatttcgcggtcgtggttgttattgttagctttgagcactccagcaacctggcggcggcctatggtatcgccgtgaccggcacgatggtgctgacgtctattctttctacgaccgtggcgcgtaagaactggcactggaacaaatattttgtcgcgctgatcctcatcgcattcctgtgcgtggatatcccgctgttctcggctaacctcgataaattgttgtccggcggttggctgccgctgagcctgggtctgatcatgttcacgatcatgaccacctggaagagcgagcgtttccgtctgttgcgtcgtatgcatgaacacggtaattcgctggaagcgatgattgcttcactggagaagtcaccgccggttcgggtgccgggtactgccgtatacatgtcgcgcgcgctcagtgtgatcccttttgctttattgcataacctgaagcacaacaaagtgttgcatgagcgcgtaatcttactgacgttgcgtacggaagatgcgccttatgtgcataacgttcgccgggtgcagattgagcagttgtctccgacattctggcgcgtggtggccagctacggctggcgcgaaacgccaaacgttgaagaggtgttccaccgctgcggtctggaaggccttagctgtcggatgatggaaacgtcgttctttatgtcgcacgagtcgttgattgtcggcaaacgcccgtggtatttgcgtctgcgtggcaagctgtatttgttgttgcaacgcaacgccctgcgcgcgccggatcagttcgagatcccgcctaaccgcgtgattgagttaggtacgcaggtcgagatttaacctcccatcaacatgccgggggccgcgttggcttacccggcctggccaatccgtagattcccacaagataatcgcctgatttccgctagcgaaacgtttcgacggcgatcacaattctgttacgtcatgatggttttatgaacacatccggggttacactgcggccagcgaaacgtttcgctagtggagcagaaaaatgaagaaaggcaccgtactcaactctgaaatctcgtcggtcatttcccgtctggggcatactgatactctggtagtctgtgatgcgggtttacccatcccgaatagcaccgcgcgtatcgatatggcactaacccagggcgtaccttcttttatgcaggtggtggatgtcgtgacccgggaaatgcaggttgaggcggcgattcttgcaacggaaatcaaacaacagaatccgcagctccacgaaacgttgctcactcaccttgagcaactgcagcaacaccagggaaacaccataaaaattagttatacgacacacgaacaattcaaaaaattgactgcagacagtcaggcggtgattcgcagcggggagtgttccccgtatgcgaacgtcattctttgcgctggcgtcactttctgaggccgctatggacgcattactgcaactcaaagggatcgataaagcgttccccggcgtgaaggctctctccggcgccgcgttaaacgtttatcctggccgcgttatggcgctggtgggggaaaacggcgccggaaaatccaccatgatgaaagtattaaccggcatctatacgcgagatgcgggatcgttgttatggctgggtaaagagaccacctttaatgggcctaaatcgtctcaggaagccgggatcggcattattcatcaggaactgaacctgatcccgcagttgaccattgcggaaaacatcttcctgggccgtgagtttgtgaatcgctttggcaaaatcgactggaaaaagatgtatgccgaagccgaccacctcttagccaaactcaatctgcgttttaagagcgataagctggtgggcgaactctctatcggcgatcagcaaatggtggaaatcgccaaagtgctgagcttcgaatccaaagtcatcattatggatgaaccgaccgatgcgctgaccgacactgaaaccgactctctgttccgcgttatccgcgaattaaaatcgcaggggcgcggcattgtctatatctcccaccgtatgaaagagatcttcgaaatttgcgatgacgtgacggtcttccgcgatgggcaatttatcgccgagcgtgaagtggccacgttgaccgaagattctcttatcgaaatgatggtgggacgtaagctggaagatcagtacccgcatctggataacgcgccgggtgagattcgcctcaaggtcgataatctgtgcggaccgggcgtgaatgatgtctcttttgtgctgcgaaaaggcgagattcttggcatctccggcctgatgggcgccggtcgcaccgagctgatgaaagtattgtacggcgcgatgccgcgaaccagcggttatgtgacgctcgatggacacgaagtggtgacgcgctctccgcaggacgggctggccaatggcatcgtttatatctctgaagaccgtaagcgcgatggactggtgctcggcatgtcagttaaagagaatatgtcgctgacggcgctggactatttcagccgcgctggcggaagcctgaaacacaaagatgagcagcaggcggtgggggattttatccgtctgttcaacgtcaagacgccttcaatggaacaggcgataggcctgctttccggtggtaatcagcaaaaagtggcgattgcccgcgggttgatgacgcgcccgaaagtgctcattctcgacgagccgacccgcggcgtggacgtcggcgccaagaaagagatttaccagcttatcaaccagtttaaggccgacggcctgagcatcattctggtctcatctgagatgccagaagtattaggcatgagcgatcgcatcatcgtcatgcatgaagggcatctcagcggtgaatttactcgcgagcaggccacccaggaagtgttaatggctgccgcagtgggcaagcttaatcgcgtgaatcaggagtaaaaaagatgacaacccaggctgtttctggtcgccgttatttcactaaagcgtggcttcttgagcagaagtcgctcattgccctgctggtgttgatcgcgattgtttcgacgttgagccccaacttttttaccgttaataatctgttcaatattcttcaacagacctccgttaacgccattatggcggtggggatgacgttggtgattctgacatcggggatcgatctgtccgtcggttccctgctggcgctcaccggtgcggttgccgcttcaatcgtcggcgttgaagtgaatgcgctggtcgcggttgccgccgcgctggcgctgggcgctgcgattggcgccgtcactggcgttatcgtcgcgaagggccgcgtacaggcgtttatcgctacgctggtgatgatgctgctactgcgtggcgtgacgatggtttacaccgacggtagcccggtcaacaccggctttaccgataacgccgatctgtttggctggttcggtatcggtcgtccgctgggcgttcctacgccggtctggatcatggctatcgtctttatcgccgcctggtatatgctgcatcacactcgtctgggacgctatatctacgcgctgggcggtaacgaagcggcgacgcgtctgtctggcattagcgtgagcaaagtgaaaattatcgtctattcactttgcggcctgacagcatcgctggcgggcatcattgaagtggcgcgcctctcttccgcgcagccgacggcgggtaccggctatgagctggatgctattgccgccgtggtgctgggcggcaccagccttgcaggtggtaaagggcgcattgttgggacattgatcggcgcattgattctcggcttccttaataatggtttgaatttgttaggtgtttcctcctattaccagatgatcgtcaaagcggtggtgattttgctggcggtactggtagacaacaaaaagcagtaacaacgactacaggacatctgaaatatgaacatgaaaaaactggctaccctggtatctgctgttgcgctgagcgccaccgtgagcgcgaatgcaatggcgaaagacaccattgcgctggtgatctctaccctcaataatcccttcttcgtgtcgttaaaagacggggcgcaaaaagaggcggataaactgggttataacctggtggtgctggactcccagaacaaccctgccaaagagctggcgaacgtgcaggatttaaccgttcgcgggaccaaaattctgctgatcaacccgactgactccgatgcggtgggtaacgcggtgaagatggcgaaccaggcgaagattccggttatcacgcttgaccgccaggcaaccaaaggcgatgtcgtcagccatatcgcgtctgataacgtgctgggcggtaagatcgctggcgactatatcgcgaaaaaagctggcgaaggcgccaaagtgattgagttgcaaggcattgccggaacatctgcggcgcgtgagcgtggcgaaggtttccagcaggcggtagccgcccacaaatttaatgtcctggccagccagcctgctgatttcgaccgtactaagggtctgaacgtcatgcagaacctgctaaccgcgcatccggatgttcaggctgtcttcgcccagaacgatgaaatggcgctgggcgcactgcgcgcactgcaaactgccggtaaagcagatgtgatggtggttggatttgacggtacgccggatggcgaaaaggccgtaaaagatggcaaactggcagcgactatcgctcagttaccggatcaaatcggcgccaaaggcgttgaagtggcggataaggtgttgaaaggcgaaaaagttcaggccaaatatccggttgacctgaaactggtcatcaagcagtaataaacgacacgggtcaactatggcctgatggcgacagaaatacgcgagcctccgctgaggtgaacgtaaaaaaaagaaaagcagggcacgcgccaccctaaccggtggcgcactttgacgtggaaccccgaatatgaaaaccgcaggtaatctcatcgtccttggcagcattaatgccgatcatatccttaatcttgagtccttccctaccccgggtgaaacggtaaccggtagccattatcaggtcgcgtttggtgggaaaggcgcgaatcaggcggttgctgcgggacgtagcggggcaaatattgcgtttatcgcctgcacgggcgatgacgatattggcgacagtattcgtaaacaattagtcagcgatcgtattgatatcgcgccagttagcgttattaaaggcgagtctaccggggtggcgctgattttcgttaatggcgaaggcgagaacgtcatcggtattcatgccggagcgaatgccgcgttatcgccggcgttggttgatgcgcagcgtgaacgtatcgcgcaggcggatgcgttactgatgcaactggaatcgccgctggaaagcgtactggcggcggcgaaaatcgcccatcaacatcatactactgttgcgcttaatccggcgcctgcccgtgagttaccggatgaactgctggcgctggtggacatcatcacgccaaatgaaacggaagctgaaaagctgacgggcgtgcgtgtggaaaatgacgacgatgccgcgaaagctgcgcaggttttgcatgataaaggcattcgaaccgtattaattaccttaggaagccgtggcgtctgggccagcgtagacggcgagggccgccgcgttcctggatttagcgttgaggctgtcgataccattgctgccggagatacgtttaacggcgcctttatcaccgcgatactggaggagacgccgttgccggaagcgattcgctttgcccatgccgccgccgcgattgccgtaacgcgtaaaggcgcgcaaccttccgttccgtggcgcgaagagatagaagcgtttttacatcagcaggggtaacgcttggctactatgaaagatgttgcccgcctggcgggagtctctacatcgacggtctctcacgttattaacaaagatcgctttgtgagtgagacgataaccgaaaaagttgaagcggcgattaaatcgctcaactatgcgccttctgcgctggcgcgaagcctcaagttaaaccagacccgcacgattggtatgctaattaccgccagtaccaaccctttttattccgaactggtgcgcggcgttgagcgaagctgttttgagcgcggttatagtctggtgctgtgcaataccgaaggcgacgagcaacggatgaaccgcaacctggagacgctgatgcaaaaacgggtagacggtttactgctgctgtgtaccgaaacgcatcagccttctcgtgaaatcatggagcgttatccgtctattcctaccgtcatgatggactggtcgccgtttgatggtgagggcgatagcgatctcattcaggataattcgttgctaggcggcgatcttgctacccaataccttatcgataaaggatttacccgaatagcctgtattaccggcccgctggacaaaacgccagcgcgtttacggctggaagggtatcgggcggcgatgaaacgcgcagggctggctattccgcaaggctatgagatcaccggcgattttgaatttggcggcggctttgacgccatgcaggcgttactcgcccatcaacagcgaccgcaagcggtttttaccggaaacgatgcgatggctgtcggcgcctatcaggcgctatatcaggcggggcttcgtattccgcaggatatggcagtcattggctatgatgatattgagctggcgcgctatatgacgccgccgctgacgactatccatcagccgaaagatgaattgggcgagctggctattgatgtgttgattcatcggatggcgcagcccgccttgcaacaacagcgacttcagcttactccggttttgacggtgcgtgggtcggtttagatttatgccgttctttaatcagattgttgccgtctttggctcttagcagcataaacatcagcgcggacacgatagtgatcgcccccatcgtgataaaggtatagtggaactgttccacggtactggtgcccgcaaaaccttcataaatacgtaacaccgccgcgctgatcgccacgcctaaactgatagacaattgctgcgtaaccgccagaacgctgttgccgctgctggcattatcgtccgtcagatccgcaagagtaatcgtattcattgccgtaaattgagtggacatcgccattccaagaatgaatagcggcagcacgagcatccagatcggcatggcgggagattgaaactaaaactgggcaatcatcagaccgataaataccgtaatgccgaccagagtcttccggtatcccaaacgtcgtaaaacctgcgttacggtcgatttcgcgataatagaacccaaagccgtcggcgccatcatgcagccggcgatcagagccgggtagccaaaaccaacctgtagcattaacggcatcaaaaaaggtacgcagcctgtccccagacgcgtggcgaggttgccggcaataccgacggaaaatgtgcgtgtcttaaacagcgatagtgatattaacggtgtcggatgacggcgggcgtggcggatataggccaatagtagaacgatactgcaaaaaataatggcggatgcgatccatgtcgccacaatcttttcgccaaacagttccattccgctggaaaataaaaccagacttaacccaaaaagaaagaagccggtcatgtcaaacttgcgacgcggcgtggtgaagttgggcatatatttgcgggcatacagaatgcctgcaacaccaatgggaatattaatcaggaagatccagtgccagcttgcccaggtcaccagtacgccgcctaataccggccccagaatcggacctaccagccccggcatagtgacaaagttaagaacgggcagcagctcactacgcggataggctcgcaataacgccagccgcgccactggcatcatcatcgctccgccgacgccttgtacgacgcgaaaaataaccaattcagatagtgaactggagagcgcgcaggccagcgagcctaacgtaaacagacttacggcaaccataaaaacgcgacgcgtaccaaagcggtcagccagccgcttaccggaattaacatagctactgtcagggtataactgataatagcggactgcatggcgagtggtgaacggttaagactatgcgcaatagccggtaaagcggtattcaaaatggtggcgtctagcgcctgcataaagaaggccatcgccgcgatccacggcaggccagccatactgcgcgcttttttgctggtcattcaatatcctgttaattatctggtctctcattgggcgctattaacaacgcctggcaggcctggaaagcgcgttcgccgtcgccatcagcgatggcatcaacaatggcctggtgcaaatccagctttaccacctcgttataggtgattgaggtaaagtaagtgtgataaaccgaatgaaatagcgtcgcaaaagagattagaaagggattggcgctcatttcgtagatatgctcgtgccacgccatatccacttcaatccagcgttcacgcttaaaatgctttttcagcgcgaccatctcttccattaaggcattaagccgcgctttctgctccggtgtgccaagagtcgccgccagcaggcaggcttgcggctccaggctaatacgcatcaccagaaaatgctctaccacctgatgaaaattttcttccgtcatccaccaggtcagcagctcttgatccagaaagttccagtttccctgcggcatcacccgcgtaccaatgcgcggacgaggtagcaccatacctttagccgtcaacgttttcaccgcttcgcgaactgccgttcgacttacgccgtactgctcgcccagttctatttcgccgggaagaatcgtaccgggggcgtagtcaccctttaatatccgctgcgccagcttttcagccagaacataggatagatttttctgtgcggctaattgttgtgcgcttaaaggcatgaatgttcttcctttctctttcgtttggttattagtatgccacctggaagtgtgattgcagttgcaataacggcaatttgcttattttatggcacgttaagcacgctattgatgaaaaaagagacactcagaaaattattttaaatttcctcttgtcaggcagaaataactccctataatgcgccaccactgacacggaacaacggcacacaggccgccgggtcagcggggttcagaccagaacctcacggagaaaagcgaaaataaacgcttgactctgaagcgggaaagcgtaatatgcacaccccgcgccgctgagaaaaagcgaagcggcactgctctttaacaatttatcagacaatctgtgtgggcactcgaagatacggattcttaacgtcctaggacgaaaaatgaataccaagtctcaagagtgaacacgtaattcattacgaagtttaattcattgagcatcaaacttttaaattgaagagtttgatcatggctcagattgaacgctggcggcaggcctaacacatgcaagtcgaacggtaacaggaagcagcttgctgcttcgctgacgagtggcggacgggtgagtaatgtctgggaaactgcctgatggagggggataactactggaaacggtggctaataccgcataacgtcgcaagaccaaagagggggaccttcgggcctcttgccatcagatgtgcccagatgggattagcttgttggtgaggtaacggctcaccaaggcgacgatccctagctggtctgagaggatgaccagccacactggaactgagacacggtccagactcctacgggaggcagcagtggggaatattgcacaatgggcgcaagcctgatgcagccatgccgcgtgtatgaagaaggccttcgggttgtaaagtactttcagcggggaggaaggtgttgtggttaataaccgcagcaattgacgttacccgcagaagaagcaccggctaactccgtgccagcagccgcggtaatacggagggtgcaagcgttaatcggaatttactgggcgtaaagcgcacgcaggcggtctgtcaagtcggatgtgaaatccccgggctcaacctgggaactgcattcgaaactggcaggcttgagtcttgtagaggggggtagaattccaggtgtagcggtgaaatgcgtagagatctggaggaataccggtggcgaaggcggccccctggacaaagactgacgctcaggtgcgaaagcgtggggagcaaacaggattagataccctggtagtccacgccgtaaacgatgtctacttggaggttgtgcccttgaggcgtggcttccggagctaacgcgttaagtagaccgcctggggagtacggccgcaaggttaaaactcaaatgaattgacgggggcccgcacaagcggtggagcatgtggtttaattcgatgcaacgcgaagaaccttacctggtcttgacatccacagaagaatccagagatggatttgtgccttcgggaactgtgagacaggtgctgcatggctgtcgtcagctcgtgttgtgaaatgttgggttaagtcccgcaacgagcgcaacccttatcctttgttgccagcgattaggtcgggaactcaaaggagactgccagtgataaactggaggaaggtggggatgacgtcaagtcatcatggcccttacgaccagggctacacacgtgctacaatggcgcatacaaagagaagcgacctcgcgagagcaagcggacctcataaagtgcgtcgtagtccggattggagtctgcaactcgactccatgaagtcggaatcgctagtaatcgtggatcagaatgccacggtgaatacgttccccgggccttgtacacaccgcccgtcacaccatgggagtgggttgcaaaagaagtaggtagcttaaccttcgggagggcgcttaccactttgtgattcatgactggggtgaagtcgtaacaaggtaaccgtaggggaacctgcggttggatcacctccttaccttaaagaactgttctttgcagtgctcacacagattgtctgatgaaaagtaaatagcaaggcgtcttgcgaagcagactgatacgtccccttcgtctagaggcccaggacaccgccctttcacggcggtaacaggggttcgaatcccctaggggacgccacttgctggtttgtgagtgaaagtcacctgccttaatatctcaaaactgacttacgagtcacgtttgagatatttgctctttaaaaatctggatcaagctgaaaattgaaacacagaacaacgaaagttgttcgtgagtctctcaaattttcgcaacacgacgatgaatcgaaagaaacatcttcgggttgtgaggttaagcgactaagcgtacacggtggatgccctggcagtcagaggcgatgaagggcgtgctaatctgcgataagctccggtaaggtgatatgaaccgttataaccggcgatacccgaatggggaaacccagtgtgattcgtcacactatcattaactgaatccataggttaatgaggcgaaccgggggaactgaaacatctaagtaccccgaggaaaagaaatcaaccgagattcccccagtagcggcgagcgaacggggaggagcccagagcctgaatcagcatgtgtgttagtggaagcgtctggaaaggcgcgcgatacagggtgacagccccgtacacaaaagcgcatgtgctgtgagctcgatgagtagggcgggacacgtggtatcctgtctgaatatggggggaccatcctccaaggctaaatactcctgactgaccgatagtgaaccagtaccgtgagggaaaggcgaaaagaaccccggcgaggggagtgaaaaagaacctgaaaccgtgtacgtacaagcagtgggagcacccttcggggtgtgactgcgtaccttttgtataatgggtcagcgacttatattctgtagcaaggttaaccgtataggggagccggagggaaaccgagtcttaaccgggcgttaagttgcagggtatagacccgaaacccggtgatctagccatgggcaggttgaaggttgggtaacactaactggaggaccgaaccgactaatgttgaaaaattagcggatgacctgtggctgggggtgaaaggccaatcaaaccgggagatagctggttctccccgaaagctatttaggtagcgcctcgtgaattcatctccgggggtagagcactgtttcggctagggggccatcccggcttaccaacccgatgcaaactgcgaataccggagaatgttatcacgggagacacacggcgggtgctaacgtccgtcgtgaagagggaaacaacccagaccgccagctaaggtcccaaagtcatggttaagtgggaaacgatgtgggaaggcccagacagccaggatgttggcttagaagcagccatcatttaaagaaagcgtaatagctcactggtcgagtcggcctgcgcggaagatgtaacggggctaaaccatgcaccgaagctgcggcagcgaacgtatcacccaagacaactttacggagttgacgattgacggagcgaagcgacgtcaaagcgttcattaaagtcgagttggcttagggatacgttcgttgggtaggggagcgttctgtaagcctgtgaaggtgtgtcgtgaggcatgctggaggtatcagaagtgcgaatgctgacataagtaacgataaagcgggtgaaaagcccgctcgccggaagaccaagggttcctgtccaacgttaatcggggcagggtgagtcgacccctaaggcgaggccgaaaggcgtagtcgatgggaaacgggttaatattcccgtacttggtgttactgcgaaggggggacggagaaggctatgttggccgggcgacggttgtcccggtttaagcgtgtaggtgtgtgttccaggtaaatccggttcactttaacactgaggcgtgacgacgaggcactacggtgctgaagcaacaaatgccctgcttccaggaaaagcctctaagcatcaggtaacacgaaatcgtaccccaaaccgacacaggtggtcaggtagagaataccaaggcgcttgagagaactcgggtgaaggaactaggcaaaatggtgccgtaacttcgggagaaggcacgctgacacgtaggtgaagtgatttactcatggagctgaagtcagtcgaagataccagctggctgcaactgtttattaaaaacacagcactgtgcaaacacgaaagtggacgtatacggtgtgacgcctgcccggtgccggaaggttaattgatggggtcagcgcaagcgaagctcctgatcgaagccccggtaaacggcggccgtaactataacggtcctaaggtagcgaaattccttgtcgggtaagttccgacctgcacgaatggcgtaatgatggccaggctgtctccacccgagactcagtgaaattgaactcgctgtgaagatgcagtgtacccgcggcaagacggaaagaccccgtgaacctttactatagcttgacactgaacattgagccttgatgtgtaggataggtgggaggctttgaagtgtggacgccagtctgcatggagccgaccttgaaataccaccctttaatgtttgatgttctaacgtggacccgtaatccgggttgcggacagtgtctggtgggtagtttgactggggcggtctcctcctaaagagtaacggaggagcacgaaggttggctaatcctggtcggacatcaggaggttagtgcaatggcataagccagcttgactgcgagcgtgacggcgcgagcaggtgcgaaagcaggtcatagtgatccggtggttctgaatggaagggccatcgctcaacggataaaaggtactcggggataacaggctgataccgcccaagagttcatatcgacggcggtgtttggcacctcgatgtcggctcatcacatcctggggctgaagtaggtcccaagggtatggctgttcgccatttaaagtggtacgcgagctgggtttagaacgtcgtgagacagttcggtccctatctgccgtgggcgctggagaactgaggggggctgctcctagtacgagaggaccggagtggacgcatcactggtgttcgggttgtcatgccaatggcactgcccggtagctaaatgcggaagagataagtgctgaaagcatctaagcacgaaacttgccccgagatgagttctccctgagacttagagtctcctgaaggaacgttgaagacgacgacgttgataggccgggtgtgtaagcgcagcgatgcgttgagctaaccggtactaatgaaccgtgaggcttaaccttacaacgccgaagatgttttggcggttaagagaagattttcagcactgattcagattacatcagaacgtaaaaacggtctgataacagaatttgcctggcggcactagcgcggtggtcccacctgaccccatgccgaactcagaagtgaaacgccgtagcgccgatggtagtgtggggtctccccatgcgagagtagggaactgccaggcatcaaattaagcagtaaactgatgtaaaaatcagtggttgtaaaagaattcggtggagcggtagttcagttggttagaatacctgcctgtcacgcagggggtcgcgggttcgagtcccgtccgttccgccaccctaattaggggcgtagttcaattggtagagcaccggtctccaaaaccgggtgttgggagttcgagtctctccgcccctgccagaaataatccttagcatctgctaaggatttttttttgcctaaaattacctgattatctgatcaggtaatcgtaagttcccttctttttcttttcatcattttcattgttcatccagcacatccgtttttaacagatcgcagatcagcgagtatttatcgctgttttgcagccaaatagcgtatagtggccgtgaaagcgttgcgctgtcggcaacggtatgtaatccgcccttttcatttgcccagtttacaggaagccagctacagccatttaatgcgctaagctgctgtcgggcgagttcggctgagctggttgttaataccggcacttcatctgctgcgatcagccctgtttcatgctgttggaagtctggtccccactccagccgcagataattgagttctgatttcttacgggcagggctgctgcaatataacgccaaagtgaagtgccctaacagctgactgctgaactcatccattttgggcgcttcggtagtaatgaggagatcaagctggcgttcatgaagttgcttcacaagcgattgccgttgagcgattctggcttcgaactgcaggccgctttgcggctcctgtagttggtacagtcgccccagccaggcgttaagcatacactcccataaagacgcgctggcgccgatggaaaactcgttatggcgtgaggtatgcgccacctctttacgtgccgcctgccacgtattcatcagcgtttccgcatacggtaaaagtttttcgccagccgtggttaaacggatattgtttctgtgccgcgtaaaaaggtttacgcccagttgattctccagttgcctgatacgaaagctcaccgcggattgcgtcaggtaaagtgcttctgcggcccgcccgaaatggcgtgtccggctaacttccaggaaagtttttaacaattccgtatccactgtgctctccacaaaattatttgtcgttatgatttaaatgttttgttttacactctgtcaagcgtaactaatactccgcgccataaatagctcagacaaagaattaggagcgtgcaggatggcggaaagctttacgacgactaatcgatattttgacaataaacattatccacgtggattctctcgtcacggtgatttcacgattaaagaggcacaactgcttgagcgtcatggtcatgcctttaatgatctggatcttggcaagcgtgagcctgtgactgaagaagagaagctgtttgtagcggtatgtcgcggtgaacgcgagccggtaacggatgcagaacgcgtctggtccaagtatatgacgcgtatcaagcgtccaaaacgcttccacaccttgtctggcggcaagccgcaagttgaaggcgcagaagactacaccgaagctgatgattaataaaaagggcgtaatgccctttttttacgccaacagcttttgcaaatgaattaacaacctgtctatcgcccgatagcttaccgcctcctgcaaatgctgacgcgagatctggtcagccagttctatgtcggcaatggttctggcaacttttagtaaacgctgccaggcgcgaatggataatccaagatgcaccagcgtgtcttcaagccagcgggcgtcatcgtgatgcaaaacacaatatttttggatttcgcgaccctccagatgcgcgtttaacttcttctggcgtcggtactgccgttcatgggcggcgatgacccgcttttttaccgtagcgctgctctcaccctttgaggcgtgttggctaagaatcccgggcggtggaagcggtatctcaagcgaaaggtcaaaacgatcaagaaacgggcctgacaaccgattaaggtaacgtagtgtctgttctggcgtgcagcgattatggtttccctgataatgtccggtcgggctgggattcattgcggcgattaactggaacctggcagggtacgttattttcgctctggtacgggataaatgaatttgaccggattctataggttcacgtagcgcatccagtgtgcgtcgttcaaattcaggcaattcatcaaggaacaaaattccgttgtgcgccagcgatatctctcccggggcgggtattgcgccgccgccgaccatagcagtaagtgaggcgctatgatgaggtgagcgaaaggggcgttgctgccatcgtttttgtaccgtatcggcattaaccagactgaggatcgcggcgctttccaacgcctcctcattgcttaatggtggaagaatcccgctcagtcgactggccagcatggttttacccgtacccggcgggccgatcaatagcagattatgtccccctgccgctgtaatctccaggccgcgtttaccctgctcctgaccgatcacatcgcgaagatcggcagttgcggtaggcgatgccatatcctgagctaaaggtctttccagggcgtgtttcccttccagaaaggcgcagacggtttgtagatgatcggcgataaaacatccttctttgcttataagcccaacctccgccgcgttctctgttgcgacgataatatttctgccggccctgatggcttccgttgcacttgatattgcgccaggaacgccgcgtaatgcgcctgtaagcgctaactcacccaccagctcatatgcctcaagattcgacgctgtaagctgctcagacgcggccagaagcgcaacagcaataggcaggtcataccttccaccctctttcggtagatcggctggagcaaggttaatggttatttttttagccggaaattcatatccgctattaataatcgcactacgtacccggtcacgcgcctcttttaccgtggtttccggtaggccaaccatggttaatcccggtaatccattactgatatgcacctctatagtgataggcggcgcattgacgccaagtgcggcgcgggtatgaacaatcgccagtgacataatccctcctgttacgtggattatgcggaatagaagagaaaatcgaattactgactttttgttttttagcgactgcttcctgaattttggcgtcattttcaggtaagaaacatcaaactggaagaacgctcgcagaagcgaaaagaaggaaaacaggatgtagagtgcgccaaaagggggaggaaaacgtgaaaatttttcagttgctaatttttcttataaaaaacaaagtacttttaggcattcacctgcattatctgaaacgtggttaaaaaaatatcttgtgctattggcaaaacctatggtaactctttaggtattccttcgaacaagatgcaagaatagacaaaaatgacagcccttctacgagtgattagcctggtcgtgattagcgtggtggtgattattatcccaccgtgcggggctgcacttggacgaggaaaggcttagaaatcaagccttaacgaactaagacccccgcaccgaaaggtccgggggttttttttggcctgaaaaacttaagcgaggagcagagcgtgaataacagcataaaattctgtttctcaagatttacgacggggatgtaactatgaacggggcacagtgggtggtacatgctttgcgagcgcagggggtgaaaaccgtatttggttatcctggcggcgcaattatgccggtttacgacgcgttgtatgacggtggtgtggagcatttgttgtgccgacacgagcagggtgcggcaatggcggcaatcggttatgcccgttctaccggcaaaaccggtgtttgtatcgccacttccggccctggcgccactaacctgatcactggcctggcggatgcgttgttagattcggtccccgtcgtcgcgatcacgggtcaggtttccgccccgttcatcggcaccgatgcgttccaggaggtggatgtgttagggctgtcgctggcctgtaccaaacacagcttcctggtgcagtcgctggaagagttgccgcgcatcatggcggaggcttttgaagtcgccaacgctggccgtcctggcccggttctggtggatatcccgaaagatatccagttggccagcggtgagctggaaccctggtttactaccgttgctaacgaagcgactttcccgcaggctgatgtggaacaggcgcgccagatgctggaacaggcgaaaaaacccatgctgtacgtcggcggtggtgttggtatggcgcaggcagttccggcgctgcgtaaatttatcgcggtaacgcaaatgccagttacctgcacgctgaaagggctgggggctgttgaagctgattatccgtactatctgggcatgctgggaatgcacggtactaaagcggctaatttcgcggtgcaagagtgtgatttactgatcgcagtgggtgcacgttttgatgaccgggtgaccggtaagctgaatacgtttgcgccgaacgccagcgtaatccatatggatatcgacccggcggaaatgaacaaactgcgtcaggcacacgtcgcgttgcagggcgatttaaattcgctgttgccggcattacagcaaccgctgaagatcgacgcatggcgtcagtcctgtgcagagctgcgcgcagaacacgcctggcgctatgaccatcctggcgagactatctatgcgccgttgttgttgaagcaattgtcggaacgcaaacccgcagacagcgtggtgacgacggatgtggggcagcatcagatgtggtcagcccagcatatgacttacacccgcccggagaacttcatcacctccagcggtctggggacgatgggattcggcttaccggcggccgttggcgcgcaggtagcgcgaccgaatgataccgttatctgtatctccggtgacggctccttcatgatgaatgttcaggagttgggcaccgtaaaacgcaagcagttaccgttgaagatagtcttactcgacaaccagcggttagggatggttcgacaatggcagcaactgtttttccaggagcgatatagcgaaaccaccctgaccgataaccccgatttcctcatgctggccagcgccttcggcattccaggccagcacattactcgtaaagaccaggttgaagcggcactcgacacgatgttggcaagcgaagggccgtacctgcttcacgtctcaatcgacgaacttgaaaatgtctggccgttggtgccgcctggcgccagtaactctgaaatgctggagaaattatcatgatgcaacatcaggtcaatgtatcggcacgctttaatccagaaaccttagaacgtgttttacgcgtggtgcgccatcgtggttttcaggtgtgctccatgaatatggaagccgcgaccgatgcgcagaatataaatattgaattgaccgttgccagtccccggtcggtcgacttactgtttagtcagttaagtaaactggtagatgttgcgcatgtcgcgatctgccagagcgctgccacatcacaacaaatccgcgcctgagcgcaaaaggaagaaaaatgacgacgaaaaaagctgattatatttggttcaatggcgagatggtgcgctgggaagacgcgaaggttcacgtaatgtctcacgcgctgcactacggtacgtcggtatttgaagggattcggtgctacgactctcacaaaggtccggtagtgtttcgtcatcgtgaacatatgcagcgcctgcgcgactcagcaaaaatttatcgttttccggtttcccagagcattgatgagctgatggaagcctgccgcgacgtaattcgtaaaaataatctgaccagcgcctatatccgtccgttggtatttgtcggcgatgtcggtatgggcgttaacccgcccccgggatacaccactgacgtcatcatcgccgcgttcccgtggggggcatacctgggcgccgaagcgctggatcaggggatcgatgcgatggtttcttcctggaaccgcgctgcgccgaacaccattccgaccgccgccaaagcgggcgggaactatctttcctcactgctggtgggtagcgaagcgcgccgccacggctatcaggaaggcatcgccctggatgtaaacggctatatctccgaaggcgcaggtgaaaacctgtttgaggtaaaagatggcgtgctgtttactccgccgtttacctcttccgcgctgccaggcattactcgcgacgcgattatcaaactggcgaaagagctgggtattgaagtgcgcgagcaggtgctgtcccgtgaatcgctgtatctggccgacgaagtgtttatgtccggaaccgcggcagaaattactccggtacgcagcgttgatggtatccaggtaggtgaaggccgttgcggccctgttaccaagcgtattcaacaagccttctttggtctcttcactggagaaaccgaggataaatggggctggttggatccggtaaattcataataaataaaattaatattttcccaaaataatttgcgtcacaggaaggcggtaacgcagcgaatccccagaagcttactgtagtaagtgactggggtgagtgaggcagccaacgcacctgtggcgtgaagtatgaagggaaaagatggggagtaaataaagcatgcctaagtaccgttccgccaccaccactcatggtcgtaatatggcgggtgcccgcgcgctgtggcgcgccaccggaatgaccgacagtgattttggcaaaccgattatcgccgtggtgaactcattcactcagtttgtgccgggtcacgttcatctgcgcgatctcggtaagctggtcgccgaacagattgaagcttccggcggggtggcgaaagagttcaacactattgccgtggatgacgggattgccatggggcacgggggtatgctctattcactgccgtcgcgcgagctgatcgccgactccgttgagtacatggtgaacgctcactgcgctgacgcgatggtgtgtatctccaactgcgacaaaatcaccccagggatgctcatggcctcgctgcgcctgaatattccggtgatctttgtctccggcggcccgatggaagccgggaaaaccaagctttcagacaaaattatcaagctggatctggttgatgccatgattcagggagcggacccgaaagtctctgacgatcaaagtaaccaggttgaacgctccgcctgtccaacctgcggctcctgctccggcatgtttaccgctaactccatgaactgcctgaccgaagcgctgggcctgtcgcagccgggcaacggctcgctgctggcaactcacgctgaccgtaagcagttgttcctcaatgccggcaagcggattgttgaactgactaaacgctattacgagcaaaacgacgaaagtgcactgccgcgtaacatcgccagcaaagccgcgtttgaaaacgcgatgacgctggatatcgcgatgggcggttcgaccaacaccgttcttcacctgctggcggcggcgcaggaagcggaaatcgacttcaccatgagtgatatcgacaagctgtcccgcaaggtgccgcagctgtgtaaagtggcgccaagtacccagaaataccatatggaagatgttcaccgtgccggcggtgtgctgggtattttaggcgagctggatcgcgccgggctgctgaaccgcaacgtgaaaaacgtattaggcctgacgttgccgcaaacgctggaacagtacgacatcacggttacgcaggacgaagcggttaaaaaaatgttccgtgctggccctgccggtatccgtactacccaggcgttctcgcaggattgtcgctgggattcgctggatgacgaccgcgcagcgggttgcatccgctcgctggaatatgcctatagcaaagacggcggtctggcggtgctgtatggcaacttcgccgaaaacggctgcattgtgaaaaccgcaggcgtggatgacagcatccttaaatttaccggcccggctaaagtgtatgaaagccaggacgacgcggtagaggcgattctcggcggcaaagtagtggaaggcgatgtagtcgtgatccgctacgaagggccgaaaggcgggccgggaatgcaggaaatgctctatccgaccagtttcctgaagtcgatggggctgggcaaagcctgcgcgctcatcaccgatgggcgtttctccggcggtacttcgggtctttccatcggccacgtctcgccggaagcggccagcggcggcactattgcgttgattgaagatggcgacactattgcgattgatatcccgaaccgcagcattcagttgcagttgagtgaggctgaaatcgccgcacgccgcgaggcgcaggaagctcgtggcgacaaagcctggacgccgaaaaatcgtcagcgtcaggtttcgtttgccctgcgtgcctacgccagcctggcgaccagcgccgataaaggcgcggtgcgcgataaatcgaaattgggaggttgatgatggcggaatctcaacctctgtcagtcgcgccggaaggggcggagtatctgcgcgcggtgctacgcgcgccagtatacgaagcggcgcaggtgacaccgctgcaaaaaatggaaaagctctcgtcacgtctggacaacgttattctcgtcaaacgcgaagaccggcagccggtacatagctttaagctgcgcggcgcttacgcgatgatggccggattgaccgaagaacaaaaagcccacggcgtgattaccgcgtcggcggggaaccatgcacagggcgtggcgttttcctccgcgcggcttggcgtgaagtcgctgatcgtcatgccaaaagcaacggcggatattaaagtcgatgcggtacgcggttttggcggcgaagtgctgttgcacggcgctaattttgatgaagcgaaagcgaaagctattgaactggcgcagcagcagggttttacttgggtgccgccgtttgatcacccaatggtgatcgccgggcagggcacgctggcgctggaactgcttcagcaggattcgcatctcgatcgtgtctttgtgccggttggcggcggcggcctggcggcgggcgtagcggtactgatcaaacaattgatgccgcaaatcaaagtgattgccgtcgaagcggaggattccgcctgcctgaaagcggcgttggaagccggtcatccagtggatctcccgcgcgttgggttgtttgctgaaggcgtagcggtaaaacgcatcggcgacgaaaccttccgcctgtgccaggaatatctcgacgacattattacagtcgatagcgacgctatctgcgcggcgatgaaagatctgtttgaagatgtgcgtgcggtggcggagccgtccggcgcgctggcgctggcggggatgaagaaatatatcgcccagcacaatattcgcggcgaacgcctggcgcacgtcctttccggcgccaacgtcaacttccacggcttgcgctatgtgtctgaacgctgcgagctgggggaacagcgcgaagcgttactggcggtgaccattccggaagaaaaggggagctttctcaaattctgccagttgcttggcgggcgtatggtcaccgaatttaactaccgttttgccgacgcgaaaaatgcctgtatttttgtcggcgtacgcgtcagtcaggggctggaggagcgaaaagagattatcacccaactgtgcgacggcggttatagcgtagtggatctctccgacgatgaaatggcgaagctgcatgtgcgctatatggtcggcggacgcccctccaagccattacaggagcgtttgtatagtttcgaatttccggagtcgcccggcgcgttgctcaaattcctgcatacgcttggcacgcactggaatatttcgctattccattaccgtagccacggtaccgattatggccgcgtgctggcggcgttcgagttaggcgatcatgagccggatttcgaaacccggctgcatgagctgggctatgaatgccatgatgagagcaataacccggcgttccggttctttctggcgggttaattcagcgtttagtttttcgggcccacaaagtaaagtgggcctgatatccagatattatcttccctcagttattgggcttttctgccagcccggagcatccactcatttcattttgcgagacgttttccagaaggcgcccaatctgcttgtggtgaaactcggctcaccatatcgttagcaccgccatcacttgcacctgctaaaaacaatgtataaaattttatacacaaaggatgttatgttactcactcgagctctctccaatgaaaaagaaattcgatgagtgggatcttctctggaggatctcctggcttttcccataacggtacgtaaagcagtcggttatcagcttcacaaaattcagtatggaattgaacccgatgactggaaaccgttttcagaaattggggctggggtaaatgaaattcgtattcgtgacaacaatggtatctatcgcgttatgtatgtcgctaagtttgaagaagcactctacgttttgcatagtttccaaaaacagacgcaacaaaccagtcagcatgataaaaacatcgccagaacgcgttataaccgggtggtgcaacaacggagaaacagcttgtgattgccaaaactgatagtgatattcgccatgtgacgccatctggcggtaatgtttttgctgatttggggtttcataagcaggacgcagaaaagttttacgctgattccctgaatgaaatcgaaaacacgttagccattaaacaacagctaatggaagaaattaccctctggattacgcaaaaccagatgaagcaagccgaggttgctacagttttgcatatatcccgaccgcgcgtttcggatgtcgtcaacaagaaatgcagcaaattcaccattgatgctctggtgaatatgcttagccgtattgggaagcctgttcgggtaatggtagggccgtaaaactaattcggtaaaatcttccagaacgcatcaattagcggctcatgcagccgctttttttgcgcgcagacgccgagttcaaacggcgttttttcatcgctgcgttctaaaatcatcacccggttgcgcactggctccgggctgttttccagcaccacttccggcagcagcgccacgccgcagcccagcgccaccattgagaccatcgcttcgtgaccgccgacggtggcgtaaatctgcggattgctgattttatgccggcggaaccatagctcaatgcgacggcgtaccggcccctggtcggccatgataaacggcaccgtcgaccagtctggcttgtcgaccgaaacctgattacgcaccgggcagggcagcgccggggcgatcagcaccaccgccagattttccagcatcgaaaacgccactgcgccgggcagcgtttctggtttgccggcgattgccagatcggcctcgccggtgactactttttccatcgcatcggcggcgtcgccggtggtgagcttaatttccaccgagggatgctcggcgcgaaaacggtcgaggattggcggcaggtggctgtatgccgcggtcactgaacagaagatatggagttcgccggaaagggacggcccctgctgatcgagggtatggcgcagctgctggtactgcaaaagcgtctgttgggcaaacactcgcagctcttcacccgcttcggtcagcgtgaccgtacggttatcgcgcacaaacagcggctggccgagatcttcttccagccgctgaatctgccgggagagcgtggaggggctgacgtgcatcgcccgcgcgctgcggccaaagtggcggctttccgccagatgcaagaaggtttttagatcgcgtaaatccacagacagacctccggtttttgacgttgcataaaccgcaacataacgttgtgaatatatcaatttccgcaataaatttcctgttgtaatgtgggttcattcgcacagatagcaatctgtaaaccgaacaataagcgcgacacacaacatcacggagtacaccatcatggctaactactttaatacactgaatctgcgccagcagctggcgcagttgggtaaatgccgctttatgggccgcgacgaattcgccgacggcgcgagctaccttcagggtaaaaaagtggtcatcgtcggctgtggcgctcagggtctgaaccagggcctgaacatgcgtgactccggtctggatatttcctacgccctgcgtaaagaagccattgctgagaagcgtgcttcctggcgtaaagcgaccgagaacggcttcaaagtaggcacctacgaagagctgatcccgcaggctgacctggtagttaacctgacgccggacaaacagcactccgacgtggtgcgttccgtacagccgctgatgaaagacggcgcggcgctgggctactcccacggcttcaacatcgtggaagtgggcgagcagatccgtaaagacatcaccgtggtgatggtggcgccgaagtgtccgggcaccgaagtacgtgaagaatacaagcgtggcttcggtgtgccgacgctgatcgccgttcacccggaaaacgatccgcaaggcgaaggcatggcgattgctaaagcctgggcggcggcgaccggcggtcaccgtgcgggcgtactggagtcttctttcgtggcggaagtgaaatccgacctgatgggcgagcagaccatcctgtgcggtatgctgcaggccggttctctgctgtgtttcgacaagctggtggcagaaggcaccgacccggcttatgcggaaaaactgattcagttcggctgggaaaccatcaccgaagcgctgaagcagggcggcatcaccctgatgatggaccgtctgtctaacccggcgaaactgcgtgcttacgcgctgtccgaacagctgaaagagatcatggcgccgctgttccagaaacacatggatgacatcatctccggcgaattctcttccggcatgatggctgactgggctaacgacgataagaaactgctgacctggcgtgaagagaccggcaaaaccgcgttcgaaaccgcgccgcagtatgaaggcaaaatcggcgagcaggagtactttgataaaggcgtgctgatgatcgcgatggtgaaagcgggcgttgagttggcgttcgaaactatggtggattccggcatcatcgaagaatccgcttactacgaatcactgcacgagctgccgctgatcgccaacaccatcgcccgtaagcgtctgtacgaaatgaacgtggttatctctgataccgcagaatacggtaactacctgttctcttacgcttgcgtaccgctgctgaaaccgtttatggcggaattgcaaccgggcgatctgggtagtgctatcccggaaggcgcggtagacaacgcacagcttcgcgacgtgaacgacgcgattcgtagtcatgcgattgagcaggtaggtaagaaactgcgcggctatatgacggatatgaagcgtattgcggtagcgggttgatataccttgtcggggggcgctagcgcttacctgacctacaaaatcaagcagacgatgtaggccgggtaaggcgtagccgccacccggctttttatttacgatacaataccttaatgatgtggtaaccgaactgggtatgcagcgggccggttggctccagtaccgggcaggaaaagactactttatcgaatgccggaaccatctggccctgacgaaattcgcctaaatgaccgccttttttaccggatgggcagatagaatgcttcttcgccagcttctcaaaatcgccgccgtttttaatttgctccagaagatctaaagccagtttctcttcttttacaagaatatgcagtgctgctgccatttttgccattattgtgttctcacgtcgcaaagattggccgtcactttatcactccttaggccgtcagacatatactcttcgccattacaggacagatgtcccgcctgatttaatgaaccgggagataagcagcatttttagcgggcgtatttcggatgtgcgggacggcggtcctgtcctttctgacaaggggcgagataccatgaacataatgaaaaacgcagaatttccagacgactggcttttagggctacgccaggtcgtacgcgacccagtgctctatgaattactcaaatactgcccgttggaaatcatgcagtacagggcgtttatgcgatgtcgcttgagtatgttctgctgacggcgatcgcgctaatgggttctttcagttggatcaagagcgcacagcgtaatggctatatgccgcttgccgccagagcctgctgattgaccttttccaggctgcctgaaaaagcagcctggtcttctctgggcctcgctttctgctacaatccctcccccgttcgaagattgagcactattcccatgcgtttaaatcccggccaacaacacgctgtcgaattcgtcaccggaccctgcctggtgctggcaggagcgggttctggtaaaactcgcgtaattaccaataaaatcgcccacctgatccgcggatgcggctatcaggcccggcatattgcggcggtgacgtttaccaacaaggcagcgcgtgagatgaaagaacgggttgggcagacgctcggccgtaaggaagcgcgcggtttgatgatctccacctttcatacgctagggctggatattattaagcgcgagtacgctgcgctggggatgaaatcgaacttttcattgtttgacgataccgaccaggtcgccttgctcaaagagctgaccgaaggcctgatcgaagacgacaaggttctgttgcaacagctgatctccacgatctccaactggaaaaacgatctcaaaacgcctgcgcaggcggcggccggggcgaaaggcgaacgcgatcgtatttttgcccactgctacgggctttacgacgcccatatgaaggcatgtaacgttctcgattttgatgatttgattttgctgccgacgctgctgctgcaacgcaatgacgaggtgcgcgagcgctggcagaataaaattcgttatctgctggtggatgaatatcaggatactaacaccagccagtatgagttggttaagctgctggtcgggcaacgcgcgcgctttacggtcgtaggcgatgacgatcagtctatctactcctggcgcggggcgcgtccgcaaaacctggtgttactgagccaggattttccggcgctgcaggtgattaagctggagcaaaactatcgttcttcgggccgcatcctgaaagcggcgaatattctcatcgccaacaatccgcacgtctttgaaaagcgcctcttttccgagctcggttacggcgcggaactcaaagtgttaagcgcaaacaatgaagagcatgaagctgagcgcgttaccggcgaactgattgcccatcactttgtgaacaagacccagtacaaggattacgccattctgtatcgcgggaatcatcagtcgcgggtatttgaaaaattcctcatgcagaaccgcattccgtacaaaatttccggcggcacctcatttttctcccgtccggagattaaagacctgctggcctacctgcgggtgttgaccaacccggatgatgacagcgctttcctgcgcatcgtgaatacgccaaaacgcgaaatcggtccggccacgctgcaaaagctgggtgaatgggcaatgacgcgtaataaaagcctgtttaccgccagctttgatatgggacttagccaaaagctgaccggacgtggttacgattcattgacgcgttttacccactggctgggggaaatccagcgtctggccgaacgcgagcctgtcgccgccgtgcgcgatctcatccacggtattgactatgaatcctggttgtacgaaacctcgccgagccccaaagcggcggaaatgcgtatgaaaaacgttaaccagctctttagctggatgactgagatgctggaaggcaacgaactcgatgagccgatgacgctgacccaggtggttacacgctttacactgcgcgatatgatggagcgtggcgagagcgaagaagagctggatcaggtacagttgatgacgcttcatgcatcgaaaggactggaattcccgtatgtctatatggtgggaatggaagaaggatttttgccgcatcaaagcagcattgacgaagataatattgaggaagagcgtcggctggcctatgttgggatcactcgcgcgcagaaagagctcacctttacattatgtaaagagcgccgtcagtatggggaactggtgcgcccggaacccagccgcttcctgttagaactcccgcaggatgatttaatctgggagcaggagcgcaaagtggtaagcgctgaggagcgaatgcaaaaagggcaaagtcacctggctaatctgaaagccatgatggcggcaaagcgagcgaaatcgtaggccggataagcgaagcgtcatccggcaatcaaactacggttagcgaacgtccagcggccagtgtacatagctttgccactggctttcctgatcaatcaactctttacccagcgggtgatgcgccagccagtcgccaggcaaggttaacgtcagattttcatttagcgcctgtagcgtaatttctggtaccagatcgtcacgacggcgaccagcaaaaagaatcgccaggcgcagcaaacggcatagctgttccgcaacacggggcggtaccgcgttttgctgatgaagcgaagagagatcgaccggattggtctgattcagtaagagggtggcgagcaattttttctgcgcgggcgtatagccaggcagatccaaatggcgtactaaataggcggcatgatagggcgcctgtttaaaatcaacgctcagaccgatctcatgcaactggcaagcgctaagcaacagttcacgactgataggctcaatatgccaggcattttctacctgtttgaggaagttatctgccagcttcgctacgcgatttgcctgatcggtatcgacgataaaccgacgctgaatgtttcgcagcgtgcggctgcggatatcctgatctaccgccagatgcaacatcccatacaccagcccttcgcgtaacgcgccgcctgccagcgtcatgctctggatgttcagctcggtaaatattgcgatcagaatagccagcccgcttgggaaaaccagcgcgcgctccagcgtcaggccttcgatttccagctcttccagacgcccgcactgtatcgcgcgttgttttagctgctgcagtttggcgagcgtaatgcgctcgtccatcccctgcgccatcatgatttcctgcaatgcctgtacggtgccggaggcacccacgcagaccttccagccatgaaaacgcagttcatcggcgaccggacgcagtacatcgcgcgcggctttctccgcgtcatcaaaattttcttgcgccagattacgatcgctaaaatagcgttcaagccacgttacgcagcccatcgacaggctaaacagcgacgtggtttgcgcgccagtgccggtaaccagttcagtgctggcgccgccgatatccaccaccagtcgctgatctgcgccgccggtggtatgagcgactccctgataaatcagccgcgcctcttcttcgccgctgataacctgcaccggacaaccaaggatagtctgcgctttcgcgataaattcccccgcattaacggcgagacgcaatgttgcggtggcaaccacgcggatttgcggctgcgggatatcctgcaaacgttcagcaaacagacgcaggcattgccagccgcgttccatcgcttcggccgaaaggtggttgtcgttgttcagacccgcggccagacgcaccttgcgttttattcgggtcagcgtctggatgcttcccgccgcctcgcgcacgaccagcatatgaaaactattggaaccgagatcaatggcggcatacaacgaggtggaattcatacacttcatccttcaacctgtatccgtgttggctgcgtactcttcctaagctcatcgggatttgttttcttgccgccttgatacaggctaaatgattttgtgtatggcataacttttcttaacctgaacgacgacgattacgcggagcgccagcgcggcgcggaccattgccaggacgcgaacgcgtcagacgcaacggcttgggcagatcgttcatgagcgcttccggattgtatttgctgaccggaatcgagtggccgatatagctctcaatggcgggcagattcagcgcatactcttcgcaagccaggctgatggaatgtccgctggcgccagcgcgaccggtacgaccgatacggtgaacatagtcttcacaatcgtctggcagatcgtagttaaagacgtgcgttacggcggggatatgcaacccgcgcgccgcgacatcggtcgccacaagaatatccagatcgccgcgggtgaactcatccagaatccgcaggcgctttttctgcgcgacgtcgccggtcagcagaccaacacgatggccatctgccgccagatgtccccagatatcttcgcaacgatgcttggtgttggcgaaaataatggcgcgatccggccactcttcttcgatcagcgtttgcagtaaacgcattttctcttcattagaggggtagaaaagctcttctttaatgcggtggccggtcttttgctccggttccacttcaacatattcggcgttgttcatctgttcaaacgccagctcgcgaacccgataagacagggtggcggagaacaacatgttcagacgctgcgcagccggcggcatacgacggaacagccagcggatatctttaataaagcccaaatcgtacatgcgatcggcttcatcgagtacgacgacctgaatggcgccgaggttaatgtgattttgtttggcgtagtcgatcagtcggcccgtcgtaccaataagaatatcaacgccgctttccagcactttaagctgcttgtcgtaaccatcgccgccgtaagccaggcctaattttaagcctgtcgcttgcgccaacggctccgcgtctgcgtgaatttgtacggctaattcacgcgtcggcgccatgatcagcgcgcgcggctggttcaccttgcgatcgtcgatcgcgggatgagaaagtaaataatgaaacgttgacgtcagaaacgccatcgttttcccggtaccggtttgcgcctgccctgcaacgtcacgacccgccagcgttagcggaagggccagtgcctgaatgggcgtacaattataaaacccttttttttcaagggcttcaaccacctgtgggtgcagggcgaagtcggaaaacttctgttctgttaaatgtgttttgctcatagtgtggtagaatatcagcttactattgctttacgaaagcgtatccggtgaaataaagtcaacctttgttggcgaagttaacatcagcacctcgttggttaatgctacaccaacacgccaggcttattcctgtggagttatatatgagcgataaaattattcacctgactgacgacagttttgacacggatgtactcaaagcggacggggctatcctcgttgatttctgggcagagtggtgcgggccgtgtaaaatgatcgctccgattctggatgaaatcgctgacgaatatcagggcaaattgaccgttgccaaactgaacattgaccagaacccaggtactgcgcctaaatatggcatccgcggtattccgactctgctgctgtttaaaaacggcgaagtggcggcaaccaaagtaggcgcactgtctaaaggtcagttgaaagagtttctcgacgccaatctggcgtaataccttttatacgtcgaatgacaaaggcgctgtatggtcaggcgtctgtcattcgacgaatgattaaggtatcaggcagtttcgtggcgtctgttgtccttacgttattcttaaattgtcaggatctctggacgcccggtctgagtcgtgctaagttagtattgacttcgaattaaacataccttattaagtttgaatctggttttatccgtcacttcccgttttttctcgcacgagaagtggaaagattcctggctcttcgctcattccgtcttgtcgtttcagttctgcgtactttcctgtgaccagacagcgaacagacatgagttgatagccgtaaacaggcatggatgaccctgccataccattcacaacattaagttcgagatttaccccaagtttaagaactcacaccattatgaatcttaccgaattaaagaatacgccggtttctgagctgatcactctcggcgaaagtatggggctggaaaacctggcccgtatgcgcaagcaggacattatttttgccatcctgaagcagcacgcaaagagtggcgaagatatctttggcgacggtgtgctggagatattgcaggatggatttggtttcctccgttctgcagacagctcctacctcgccggtcctgatgatatctacgtttcccccagccaaatccgccgtttcaacctccgcactggtgataccatttctggtaagattcgcccgccgaaagaaggtgaacgctattttgcgctgttgaaagttaacgaagttaactacgacaaaccggaaaacgcccgtaacaaaatcctctttgagaacttaaccccgctgcacgcaaactctcgtctgcgtatggagcgtggtaacggttctaccgaagacttaacggcgcgcgttctggatctggcttcgccgatcggtcgcggccagcgcggtctgattgtcgcgccgccgaaagcgggtaaaaccatgctgctgcagaacatcgcgcagagcatcgcgtataaccacccggactgcgtgctgatggtgctgctgattgacgaacgtccggaagaagtgaccgagatgcagcgtctggtgaaaggcgaagtggttgcttctacctttgacgaaccggcatcccgccacgttcaggttgccgaaatggttatcgagaaggcgaagcgtctggttgaacacaagaaagacgttatcatcctgctcgactccatcacccgtctggcgcgcgcctacaacaccgtggtgccggcttccggtaaagtattgaccggtggtgtggacgctaacgccctgcatcgtccgaagcgtttcttcggcgcggcgcgtaacgtggaagagggcggtagcctgactatcatcgcgacggcgctaatcgataccggttccaagatggacgaagttatctacgaagagtttaaaggcaccggtaacatggagctgcatctctcgcgtaagatcgctgaaaaacgtgtcttcccggctatcgactacaaccgttccggtacccgtaaagaagagctgctcaccactcaggaagagctgcagaaaatgtggatcctgcgtaaaatcatccatccgatgggtgaaattgacgcgatggaattcctcattaacaaactggcgatgaccaaaactaatgacgactttttcgagatgatgaagcgctcataacctggtctttacctgaaaacgccacgtttttacgtggcgtttttgttttgcgattcatcctggcgtcatgtcatataaactggtcatcgggatatgcgctacagagtaacaccatgcacaatacacattgtttgcggtaaaaagtgtaatgttctaacaggtctcttctaggagctggcgtaacgcattatactttaaggaaatgatatatgctgagagcacatacactgtgaagttactcaccgctttatctgagctaatcagtatttttttattcacgaccatttttatttttcttgcgcgaaaagtagccataaaaattggtttagtggataaaccaaactttcgtaaacgacatcagggcgttatcccattagtcggcgggatttctgtgtttgcaggaatctgctttatgtttggcctctcggattactacataccgcacttatcgctatatcttatttgcgctggtgtattggtttttgttggtgcgatggatgaccgttttgatatcagtgtaaaaattcgtgctgtggttcaggctgttattgcggttgtaatgatggttatcgcaaaacttcacttaggtagccttggttacatctttgggccttgggagttagtgcttggcccctttggctatttccttactctgtttgcggtatgggcggcgatcaacgctttcaatatggtggacggtattgacggcctgctgggtgggttatccagcgtctcatttgcggcgatggggctgattttatggtttgatggtcagactagtctggcaatgtggtgctttgccatgatcgccgcgattctgccttacattatgcttaatctcggtattttggggcggcgttacaaagtctttatgggcgatgccggtagtacactgattggctttaccgtcatctggctcttactggaaacgacgcaggggaaaactcactctatcagcccggttaccgcgctatggattatcgctattccattgatggatatggtggcgattatgtatcgccgtctgcgtaaagggatgagccccttttcccctgatcgccaacatattcatcatttggttatgcgagcagggtttacttcccgccaggcatttgttcttattacgctcgcagcggcgattctggcgggagtaggcgtaacggcagaatactctcattttgttcctgaatgggttatgttggtgctctttttgctagcattcttcctctatggctactgcattaagcgggcctggaaggtggcgagatttattaagcgtgtgaagcgtcgcctgcgcaggcaacgtgagaaccggccaaacttaaccaagtaaatgaggatacgatgacacaaccattaccgggggcacgcgcggtgagcgctgaaaatgaactggatattcgcgggttgtttcgtactttatgggctggcaaattctggattatcggcattggcctgctatttgcccttatcgcgttagcctataccttttttgctcgtcaggagtggagtgcgacggcgatcaccgatcgcccaaccgtaaatatgttgggcggttattactcccagcagcagtttctgcgcaacctggatattaagaccgatcctgcttcttctgataagccctcggtgatggatgaagcgtataaagagttcatcatgcaacttgcctcctgggatacgcgtcgcgatttctggttacagacggactattacaagcagcgaatggtcgggaatagcaaagctgatgcggcgatgcttgatgaactgatcaataacatacagtttacgcccggcgattttacacgcgccatcaacgacaatgtgaagctgattgctgaaactgcgccggacgccaataatctgctgcgtcagtatgtcgcattcgccagccagcgggcggcgagccatctgaatgatgaattaaaaggtgcctgggctgcgcgtaccgtgcagatgaaagcccaggtcaaacggcaggaggaggttgcgaaagcgatctattcgcgtcgtgtaaacagtattgagcaggcgctcaaaattgcggaacaacataatatttctcgtagcgcgacggatgtcccggcggatgaattaccggactcagagctttttttactcggtcgccctatgttgcaggcgcgtcttgaaaatctgcaagcggttggccctgcgttcgatttggactactttcaaaatcgggcaatgttgaatacgcttaatgtggggccgaccctggaccctcgttttcagacctatcgttatttgcgtacgccggaagaaccggtaaaacgtgatagcccacgccgagccttcctgatgatcatgtggggtatcgttggggcgctaatcggtgcgggcgttgccttaacccgtcgccgcacgatttagcaacacctctgcagtagggggctgggcccctactgtctattcgaagagaatcgatgtgaaagtactgactgtatttggtacacgaccggaggccattaagatggcgcctctggtccatgcgctggaaaaagatcctcatttcgaggccaaagtatgcgttactgcgcagcatcgggagatgcttgatcaggtattaactcttttttctattgtgcctgattacgatctcaacattatgcagccgggacaggggttgacggaaattacctgccgaattctggagggattaaagccgatcctggcagattttaaacctgatgtggtgctggttcatggcgataccaccactacgattgctaccagcctggcggctttctatcaacgaattccggtagggcacgtagaagccgggttgcgaaccggcgatctctattccccctggccggaagaggcaaaccgcacgctgaccggacatctggcgatgtaccactttgcgccgacggaaaactcgcggcagaatctgttgcgggagaacattccggatgagcgcatttttgtcactggcaataccgttatcgacgcgctgatctgggtacgcgatcgcgttctgacgagcgatacattacaggctgaactggccgagcagtatcctttcctcaacgcgaataagaagatgattttagtgaccggtcatcggcgtgaaagctttggtcagggctttgagcatatctgccaggcgctggcggaaatcgccgccgcgaaccagaatgtgcaaattgtctatccggtgcatctcaatcccaacgtcagcgaacctgtcaaccgtatcctcggccatgttgaaaacgtggtactgattgagccgcaggactacttaccttttgtctggctgatgaatcacgcctggctcattctgaccgattccggcggtattcaggaagaagcgccgtcattaggtaagccggtattggtcatgcgtgaaaccacagagcgtccggaagccattaccgctggtacggtaagactgatcggcacggactcccggcgcattgtggcggaagttatgcgtctgctgcacgacgaaaatgaatatcaaaccatgagccgcgcccataatccttatggtgacgggcaatcatgcgcgcgcattttacaggcgttaaaaagttatcgggtatcgttatgagttttacgaccatttctgttattgggctggggtatatcggattaccgactgcggccgcttttgcttcccgccagaagcaggttatcggcgtggatatcaaccaacatgcggtagacattataaatcgcggtgaaattcacatcgtggagccggcgttgggcaatgtggtgaagatggcggtggagggcggctttctgcgtgcgacgacgacacctgtcgaggccgatgcgtacctgattgccgtgccgacaccattcaaaggcgatcacgaccctgacatggcctatgtcgaagccgcggcgaaatccattgcgccagtattaaaaaaaggggcactggtgattctggaatcaacatcgccggtcggcgcaacggagcaaatggctggctggctggccgggatgcgcacggatctgacctttccccagcaggcgggcgagcaggccgatgtgaatatcgcctattgtccggagcgtgtgctgccgggtcaggtgatggtggaactcattaaaaatgaccgcgtgattggcggtatgacgccagtatgttcggctcgcgccagcgcgctgtacaaaattttccttgagggcgaatgcgttgtcaccaactcgcgcaccgcggagatgtgcaaactgacggaaaatagcttccgtgatgtgaatatcgcctttgcgaatgaattgtcgctgatttgcgccgaacaggggattaacgtttgggaattgatccgcctggcgaaccgccatccgcgcgtcaatattttgcagccgggcccaggcgttggcgggcactgcattgcggtcgatccgtggtttattgtggcgcaaaatccgcagcaggcgagactgattcgcaccgcgcgtgaagtgaacgacggcaaaccgcactgggtggtcgatcaggtaaaagccgcggtcacagattgcctggcggccaccgataaacgcgccagcgaagtgaaaatcgcctgttttgggctggcctttaagccgaatatcgacgatctgcgcgaaagcccggcgatggggatcgcgcaaagtatcgcccgctggcacagcggcgaaaccctggtcgtcgaaccgaatatccgtcagttgccgaaaaaattggacggactttgtacgctggcgaaactggacgcggcgctggccgccgccgatgtgctggtgatgctggtcgatcacgacgaatttaaagcgattcccggcgatgcggttcatcaacgttatgtggttgataccaaaggagtctggcgctgatgaaacgcattctggtgaccggcggcgcaggctttatcggatctgcggtggtgcggcatatcatccatgaaacggcagacgcggtggtggtggtggataaactcacctatgcgggcaacctgatgtctctggcgtcggtggcgcaaagcgaccgtttcgcctttgagaaggtggatatctgcgatcgggcatcactggagcgagttttccagcagtatcagcccgatagcgtgatgcacctggcggcggaaagccatgtagaccgttccatcgacggcccggcggcgtttattgaaacgaatatcgttggtacttacaccttgctggaagccgctcgcgcttactggtccgcgcttgacgcggacgctaaagcggcgttccgcttccaccatatctccaccgatgaagtgtatggcgatctgcatactgcagacgatttcttcaccgaaaccacgccatatgcgccaagcagcccttattccgcctccaaagccagcagcgaccatctggtacgcgcctggttacgtacctacggtctgcctacgcttgtcaccaactgctctaataactacgggccctaccatttcccggaaaaactgatcccgctgatgattctgaacgcgctggcgggtaaaccattgccggtctatggcaacggtcagcaaattcgcgactggctgtatgtggaggatcatgcccgtgcgttgtatcacgtggtgacgaacggcgcggtgggtgaaacgtataatatcggcggtcataacgaacgtaaaaatctggatgtggtcaggacgatctgcgctctactggaggaactggccccgcaaaaaccgcagggtgtggtgaattatcacgatctgattaccttcgtcgacgatcgccccggccatgacttacgttatgccatcgacgcgtcgaaaatcgcccgcgagctgggctggacgccgcaggaaaccttcgaaagcgggatgcgaaaaaccgttcagtggtatctcgccaatgaggcctggtggaaacccgtgcaggatggcagttatcagggcgaacgcttaggactgaaacgctaaacggcaggttcttactcctggaggagaaacgaatgaaaggcatcattctggcgggaggttccggtacccggttgcatcccattacgcgcggcgtatcaaagcgccagggcttcaaaattgcctgtctggaggagattgcctggcgcaacggctggctggatgatgatggtttgaaacgcgccgccagtcagcttgaaaaaaccggctatggccaatatttactggagttgctccgtgcccgtccgcgccagtattgaaccgttactctgggaaaatacgttctttggcgtgaatagcggcattgtgcgtatcgatgcctcagcgcccgaattaacgccagaagcactgcaggcgtggcaacgcgtgcaggtaaaagtgccggctgaaaacatcgcctggctgtcggcgttgcaatcgctgggattctctttggttgaaggcgaggtggattttgcgttgccggtaaaagggcatcgcgaccagcatggcgcggaaattgcacaccttacggacattcctgctttgcgtcagttggccggagaggcgtttacgcagagtcgttttcgcgcgccgtggtatgcgcccgacgccagcgcccgtttttacgcccagtggattgagaatgcggtacgcggcacgtttgatcaccaatgcctggtgcttcgcacggagacaggcgctatccgcggttacgtctcgctgcgggaattgaatgataccgacgcgcgcattggcctgttggccggacgcggcgcgggagcggaacttatgcaggcggcgatctgttgggcgcagagtcgcggcaaagcaacattgcgggtggcgacccagttgggcaacaccgccgcgcttaaacgttacatacaaagcggtgccaacatcgaaagcactgcgtactggttatacaggtgacaacatgattccttttaatgcgccgccggtggtgggaaccgaactcgaatacatgcagtctgcaatgagcagcggcaaactgtgcggcgacggcggctttacgcgtcgttgccagcagtggctggagcaacatttcggcagcgcgaaggtgttgctaacgccttcctgtaccgcatcgctggagatggcggctctgttgttggatattcagcccggcgatgaagtgatcatgccgagctttacgtttgtctccaccgctaacgcttttgtcctgcgcggcgcgaaaattgtgtttgtcgatattcgtccggatacgatgaatattgacgaaacgctgattgaggcggcgattactgataaaacccgcgctatcgtgccggtacactacgctggcgtcgcttgtgaaatggacgtcatcatggcgctggcggataagtataatctgttcgttgtcgaggatgccgcccagggtgtgatgtccacgtacaaagggcgcgcattagggacgatcggtcacatcggctgttttagcttccatgaaaccaaaaattacaccgctggcggcgaaggcggcgcgacgctgatcaacgatcgtacgctaattgaacgcgcggagatcatccgcgaaaaaggcaccaaccgtagccagttcttccgtggtcaggtggataaatacacctggcgggatatcggctccagttatttgatgtccgatctgcaggctgcctatctgtgggcgcaactggaggccgccgatcgtatcaatcaacagcgtctgtcgctgtggcagacttactacgatgcgttaacgccgctggcgcgcgccgggcgtttcgagctgccttctattccggaaaactgcgggcataatgcccatatgttttacatcaaactgcgggatatcgccgatcgcagcgcgctgattaatttcctgaaagaggcggaaatcatggcggtattccattacattccgctgcatgattgtccggcgggcgataaattcggcgagtttatcggggacgatgtctacaccacaaaagagagcgaacgtttgttgcgtctgccgctgttttataaccttgcgcccgtcgatcaacgaacggtgattactaccttgctaaattatttctcctgatatgtcgcttgctaaagcctccctgtggacggcggtcagtacgctggtaaaaattggcgccggactgctggtggtgaaactactggccgtctcttttggtccggcgggcgtcggacaagcgggtaacttccgccagatgattaccgtgctgggcgtattggctggcgccgggatatttaacggcgttaccaaacttgtcgcacaacatcatgataacccggcgcagttacgtaccgtggtgggaacctcctccgcgatggtattggggttctctacgctgctggcgctggtcttcttgctggcggcggcgccgattagccagggattgttcggtcatacggactatcaagggctggtgcgtctggttgcgctggtacaaatggggatcgcctgggcgaacctgctgctggcgctaatgaagggctttcgtgacgcgtcgggtaatgccttatcgttaattgtcggcagctttttgggcgtcgccgcctggtatctctgctaccgtgtcggcggctatgaaggcgctctgcttggcctggcgctggtgccggcgctggtggtagtgccagccggtataatactgattaagcgcggcaccgtcccgctacgctatctcaagccctcctgggacaacggtctggcagggcagctcagtaaatttaccctgatggcgctgattacctccgttacgatgccggttgcctatgtgatgatgcgaaaccaactggccgcgcactatagctggagcgatgtcgggatctggcagggcgtaagcagtatttctgacgcctatctgcaatttatcaccgcctccttcagcgtttacctgttacccacgctctcacgcctgacggaaaaacaggacattacgcgtgaagtggtaaaagcgctgaaatttgttttaccggcggttgcggcggcgagttttaccgtctggctactgcgcgattttgctatctggctgcttttttccgctaaattcaccgcgatgcgcgatctgttcgcctggcagttagtgggcgacgtgctgaaagtcggcgcctatgttttcggttatctggtgattgccaaagcgtcgttgcgattttacattctggctgaaattagccagttcattctgttaacggcgttcgctcactggctgattcccgctcacggcgcgctgggtgcggcacaggcttatatggccacctatattgtctatttttcactttgttgcggcgtatttttactctggcgtaggcgagcatgactgtactgattcacgtcctgggatcggatatccctcaccataaccacaccgtgctgcggtttttcaatgatacgctggccgccacaagcgagcacgcgcgcgaatttatggttgccggcgaagataacggcttcacggaaagctgcccggcgctctcgcttcgtttttatggcagtaagaaagcgctggcgcaggcggtcatcgccaaagcgaaagcaaatcgtcgacagagattcttctttcacggtcagttcaacaccagcctgtggctggcgctgttaagcggcggtattaagccagcccagttttactggcatatctggggcgcggatctctacgaagtgtcccacgggctgaaattccgccttttctacccgcttcgtcgtatcgcgcaggggcgagtagggggcgtattcgcgacgcgcggcgatctcagctattttgcgcgtcagcatccggacgtacgcggcgagttgctctatttcccgacgcgcatggacccttccctgaatgctatggcaaaagagcgccaacgtgcggggaaattgaccattttggtagggaactccggcgatcgcagtaaccaacacattgcggcgttacgggcggtgtatcagcagtttggcgacgcggtaaacgtggtggtgccgatgggctatccggccaataaccaggactatattgatgaggttcgtcaggccggtctggcgctatttagcgccgaaaatttacaaattcttagcgaaaaaatggaatttgatgcctatcttgcgctgttgcgccagtgcgacctcggttattttatttttgcccgccaacaggggatcgggacgttgtgtctgctaattcaggccgatatcccgtgcgtactgaatcgcgacaatcctttctggcaggatatggcggaacagcatctgcccgtcctgtttaccacggacgatcttaatgagcaggtcgtgcgcgaggcgcagcgtcagctcgcatcggtagataaaagcggcatcaccttctttagccccaactacctgcaaccgtggcataatgcgttgagaatcgccgcaggagaagccgaatgagtttaatgcaattcagcgggctgctggtggtctggctgctctctacgctgtttatcgccacgctgacctggtttgaattccgccgcgtgcgttttaacttcaacgttttcttttcgttgctgtttttgttgaccttcttttttggttttccgctaaccagcgtgctggtatttcgtttcgacgttggcgtcgcgccgccggaaatcttattgcaggctctattatccgccgcctgtttctacggcgtgtattacgtgacctataaaacgcgtttacgcaaacgcgttgtggatgtaccacgcaagccgctatttaccatgaaccgggtggaaacccaccttacctgggtgatcctgatgggcatcgcgctggtgagcgtggcgattttctttatgcataacggctttttgctgttccggctgcactcctacagccagatcttttccagcgaggtctccggcgtggcgttaaaacggttcttctatttcttcattccggcgatgctggtggtctatttcctgcgccaggacagcaaagcgtggctgttctttctggtgagcaccgtcgcgtttggtctgttgacctacatgattgtcggcggcacgcgcgctaacatcattattgcgtttgctatcttcctgtttatcggcattattcggggctggatcagcctgtggatgctggcggcggcgggcgtgctggggattgtcggtatgttctggctggcgctcaaacgctacggattaaatgtgagcggcgatgaggcgttctatacgtttctttatctaacgcgcgataccttttcgccgtgggagaatctggcgctgctgttgcaaaattaccacaatatcgagtttcaggggctggcccctatcgtgcgtgatttctacgtctttattcccacctggttatggccgggacgacccagtattgtgctgaactctgcgaattacttcacttgggaagtcctgaacaaccattctggcctggcgatatcgccaacgcttatcggatcgctggtggtcatgggcggggcgctgtttattccgctcggcgcgatcgtcgtcgggctgattatcaaatggttcgactggctgtatgaactgggtaaccgggagcccaatcgctataaggcggcgattctgcacagtttctgctttggcgccatctttaatatgattgtgctggcgcgagaagggctggattcgtttgtttcgcgcgtggttttcttcctggtggtttttggcgccagcctgctggtcgctaagcttctgttctggttatttgatagcgccgggctgattcataaacgtacaacttcgctccctcaggcacaggtggaaggaaaactatgaccaataatgccgctgcgcccctttactcgctgcgtggattacctctgattggctggcgcgacatgtcacacgcgctgaattatctgtttgccgatggtcaactgaagcaaggcacgttggtggcgatcaacgccgaaaagctgctgacggcggaagataatccggaagtccgcgcgttgatagcggcggcggaatttaaatatgccgatggcatcagcgtggtgcgttcaatacgtaaaaaatttccgcaggcgcaggtttctcgtgtggctggcgccgacctttgggaagcgttaatggcgcgcgcgggaaaagaaggcacaccggtatttcttgtcggcggcaagcctgaggtgctggcgcagacggaagcaaaactgcggacgcagtggaacgtcaatattgtgggtagccaggacggttactttacgccggagcagcgtcaggcgctatttgcgcgtatccatgccagcggcgcgaaaattgtcaccgtcgcgatgggatcgccaaaacaggaattgctaatgcgcgattgtcgggaagtgcatccccatgcgttatatatgggggtgggcgggacctatgatgtgtttactggtcacgtcaaacgcgctccaaaaatatggcagaacctgggactggagtggttgtatcgtctgctttctcaaccgaggcgtattacccgccagatgcgcctgctgcgctatcttcgctggcactatactggcgatctctaattctcccttctgatgacttgagcagcggattgtgcttatggtgctgctcatttacaacataatcgatgatttcttacacaataagtgcatttttttaatgctccatttgccatttgtccaaatttaagaaaatattcgcaacaatcgatgtacccataacaataaccggtactaccggaaccgttgcaaacacgacatgaggatttatggcagagaaaaaaccggagctacagcgtgggctggaagctcgtcatattgaattgattgccctcgggggcaccatcggcgtcggactctttatgggcgccgccagtacgctgaaatgggcgggcccgtcagtgctgctggcgtatatcatcgccggattgttcgtctttttcatcatgcgttcgatgggggagatgctctttctggaacctgttaccggctcctttgccgtgtacgcccaccggtatatgagtcctttttttggctatcttaccgcctggtcatactggtttatgtggatggcggtcgggatctcggaaattaccgccattggggtctacgtccagttctggtttccggagatggcgcagtggataccggcgctgattgccgtcggactggtcgcgttggcgaatctggctgcggtgcgcctgtatggtgaaatcgagttctggtttgcgatgatcaaagtcaccacgattattgtgatgatcatcatcggtctgggggtgattttcttcggctttggtaacggcggccaggcgattggctttggtaatctgaccgagcatggcggcttttttgccggcggctggaaaggctttctcaccgcattgtgtatcgtggtggcctcttatcagggggttgagttgatcggtattaccgccggtgaagcgaagaatccgcaggtgacgttgcgtagcgcggtgggtaaagtgctgtggcgtatcctgattttttatgttggcgcgattttcgtgatcgtcaccattttcccgtggaatgagattggcagcaacggcagcccctttgtgctcaccttcgcgaaaatcggcatcaccgccgcggcaggcattatcaactttgtcgtgctgacggcggcgctctccggctgtaacagcggaatgtatagctgtgggcgtatgctttacgcgctggcgaaaaaccgtcaactgccggcggcagtcgcgaaagtctctcgccacggcgtgccggtcgcgggcgtggcgctctctattttgattttgctggtaggttcttgcctgaactacatcatccccaatccgcagcgcgtctttgtttacgtttatagcgccagcgtactgccggggatggtgccgtggtttgtcattctgattagccaactgcgctttcgtcgggcgcataaagaagcgattgcggatcatccttttcgttccattatgtttccgtgggcgaactatttgacgatggcgtttctggtttgcgttttaatcggcatgtactttaatgaagatacgcgcatgtcgctgtttgtcggcgtcatcttcctgctggccgtcacgctggtctacaaagttttcggtctgaatcgtcacggaaccgcccacaaggtgggggaataagcgccaaaatgcgcaaagcataaccaaacgcgcattttatttaaaaaggcactggacagcggggtgtgaagtccgtattatccacccccgcaacggcgctaagcgcccgtagctcagctggatagagcgctgccctccggaggcagaggtctcaggttcgaatcctgtcgggcgtaccatttatttaggtgcttgagctgcggtggtttaataccgcgtaaaaagtttcagtggtggctatagctcagttggtagagccctggattgtgattccagttgtcgtgggttcgaatcccattagccaccccattaatatagagttgtgaaacgcgaaggtggcggaattggtagacgcgctagcttcaggtgttagtgtccttacggacgtgggggttcaagtcccccccctcgcaccacgactcaatgaattgaactaaaaattcaaaaaagcagtatatcggcgagtagcgcagcttggtagcgcaactggtttgggaccagtgggtcggaggttcgaatcctctctcgccgaccaattttgaaccccgcttcggcggggttttttgttttctgttccttttcaaccccttatcccgcacgtgttgccattatgatttgttggcgatatcccaggcttcatttgtcgctattcggtgacgagtaatctattgatttataatcactttgtaaaaagcatcctgttctgtctccaccgggcgacacgctaaaacctcgccagcggcggggggatgacaatcgcgtgaattctctacgtttttttaatgcctgcgcctgttttttagcggtgcaaagatggcacgttatgtgcaataatgtacgggtagatgctcattccatctcttatgttcgccttctggcctcataaactcaggaatgatgcagagccgtttacggtgcttatcgtccactgacagatgtcgcttacgcctcatcaaacaccctggacacaacgttgagtgaagcacccctttatgttgtcatacagacctgttttgacgcctgccccttaaccgggcaggcgtttttttatgcatctcgaatgattttgtgtaggcggtaggcccggtaagcgaagcgccaccgggcaagagggaattactgcgggggattgttctgtaatgtcagcatcaggccgtcgcgccgcatggcggcggcctcttccggttgatgcagtcgatcaagcgcatcggcaagccaggcataatcatacgcgtccgggcgttgtttcagcgcggcgcggaaagccagggtcgcctcctgccattcaccgtgtttcattagcgactggccgagcgtgctccataacagcgggcgatcgcctaccgtcttgatttgctggcgcagcactttctccagttgttccggattattggttctgaggcgaggaatgggcagcaccagccgatcgtcatactggcgtttcagaccgtcgatgataatctgctgcgccatatcatgatcgtcacattcgatcagatgctcggccattgcgacctgcagcgccacctgatggcgggttttacggctttggtttttccaccaggtgcgtaatccttcgctgccctgctcggcgcgcgcctgatccatgagtcctatccacgcctgttgttcgagcatagcgcgatgcgcttcatcgccaacgtgcgctttcgccatggatgggatgatatccagtaaagaactccatgcgctggtgcgaatataggcctgctccgccagacgcagaacttccgggtgacgcggcgtgacctccagcagtttgtccacgccgtgacgcgccgcgtgattttcattgcgcgccagctgtaagcgcacgcgcgtgatctcgaccgggatggtgtcgttccccgccagctctgccgcacgttcaaggtgctgattagcgcgcgcttcatcgccgcgctgctgcgctgcttctgccgccagcagataatttaccaccggttgttcagcatgatcggcattttttgacatcagcttttcaacctgctgataatcgccctccgccagcttcagcagcgcctgttcggtctgcttgcgggcgcgacggcgtttacggccggcaaaccaaccgcgggtgtgcgcgccggtacgaaacagacggcgtagtaaccactcaatggcgaatagcaccaccatagcgacgatgagaatgatcgccaggccggtgacgctggtttcaatgttgtagttatcggtctggattaacacatagccctggtgaccggctatcatcgggccgaccacgatacccgcaagcaacaacacaaagagcaataatacttttagcatcattattctccttgcggcgcggctgccggagcgtctgtctgcgtggcaggcgctgccgtagagactgtcggttgcgccagcagattacgcacgcgggtttgcatcagtttttcaagaatcgcctggcttcccagggtttctggcagatccatcgtgatattttgctggcttaatttatcgacctcctccaggaaggcttttgtcgcggcgtcgtcagtatcgtaataagcgcgaacccaggtcgaaacgttatccagcgcctgacggtatgtttcttcctgatggcgtggcacggcctgcgcggcgactaacaggcgggagcgaatattttcgcgtaaatagacgtcctggttgggtgccaacagcggtacggcggtatcatcgcggcggcgaatggtaataaagctgtccataaagttctgccagcttttttgcaggttaacgcgccattcgcttaacgagctggacagctcgctgctgtctgaatccatcggcgaaccatcggtatcgttatccgccagacgcaggttatcgatttggttagagagctgattgagcttgagaataatgccgtcgtagtcgatctgcgcaacggatgacaggctggcgatatcgtcagtaatcgcgcgtcgtgcggtaatcaggctggggtcattcatgtccgccagactggcgtcagcgcttttgagcagcgcagcggcggtagtgacgtcctgatcgctccacagcttgcgtccggcgagtttcaccaggaaatcagcctgcgccagcagccaggttttagcatcgctgccggaaatagtggcgactttttgttgtacttcatcaagctgtttcgccagcgccgcctgttggcgattcgcgtcatctaactgcgccgcttgttttttgataatcccttccagctccgctttttggctctcctgcgccttttgcaaggcggtcagttgcgtcgccagcgcatcgctggtttccgtttgcgcggttgcttgctgtttcccccagccataaagcccaatacctgccgccagggcaatcgcaatcgccaccgcgcttaataccagcgcggcgccgttcttactttttttctcggtattaactggctgtggcgtggtttccacgctctccctggtctcatcaaccacggcggaggatttttcttgttccgtcattatggcatcccattatgagagttattgtaatgcgcgcaacagcgcatcgttgtcggcgttatcagcgaccttaatatcttgccagcccagttcccgggcgaggtgcgccagacgctcactgacgaccaatagccgacagcgtagtaaccagtgctcacgataccactggggagtcagcgaccagagccgttgcaacatctcgccgctggtaacaacaagcgttgttacgccgcgagtatgccagcgcatcgcttcttccacgccatcgtaatgtttcgcacatcgttgataacattcacaaaaactgacttcggctccgcgcgctgtcagggtttcgcccagcagttcgcggccgccattgccacgcaaaatcagcgcgcgtttgcccgcaatattttgtaattcaggtaattgtagcaaggcttcgctgatttcccgatccaatggataacgaatatcgaacccgctaacggtatgaagggcgagcgccgtggtgcggccaatcgcgaaatagcgcggcgccacaggccagtttcgaccatcccgctggagctgggcgtgagcaaaggcgacagcgtgctgtgaaagggcaaaaaccagatcgttttccgtcagcgtcgccaggcggtcggccagggtgggtagctcccgaccggcgacaaattcaatcagtggaaaactccaggccacctgccccagtgcgcgcagacggctcactaacgcttcccctgcgggagaggggcgggtgatcagaatactcatgcgggcgtctcgccgttataaacttccgtcagaatcgcgcgtgcgccgttttccagcagttcctctgcaagcgagatgcccatttgctccgcctgctcgggagaaccacgacgttcgccgcgcaccatcaccgaaccgtccggcgcgccaaccagcgcgcgtagccaaatttcaccgttgatgatttctgcatagctgccaatcggcacctgacaaccgccttccaggcgggtgttcatagcgcgttccgccgttacgcgcagcgcggtttgcgagtgattcaacggtgcgagcagcgcctgtgttcgcgcgtcgtcaagacgacactcaatcccgacggcgccctggcctacggcaggaagcgaaacgtcgggcggcaaggctgtgcgaatgcgcgactccagacctaagcgtttcagaccggccacggccaggataatggcgtcatagtcgccgttgtccagcttgccgagacgtgtgccgacgttgccgcgcaacgaacggataatgaggtccggacggcgttccgccagttgacactgacgacgcaaactggacgtcccgacgatactacccgcgggcagatcgtccagactgtgatatttattcgagacaaacgcgtcgcgcggatcttcgcgctcgcaaatggtcaccagaccgagaccgtccgggaaggccaccggaacgtctttcatagagtgcacggcgatatcagcacgtttttccagcagcgcgatttcaagctctttaacaaacagtcccttaccgcccactttcgccaggggagtatcgagaatcacgtcgccgcgtgtgaccatcggcaccagttctaccgtcagtcccggatgggttgccatcaatgcgtctttgacataatgtgcctgccaaagcgcaaggggactttggcgtgtggcaattcttaaaacattgtctaacatgcttgttaccgtcattatcaatcattgaccatcctaacatccttatagagagtatgttagttttccggtcaccgtgagtgagaggataaggcgcagtgtcgtcaatgacagtgaataatgacgagaaaccgccagcccgtatttaagaatttacacgcagcgaacggtgctacacttgtatgtagcgcatctttctttacggtcaatgagcaaggtgttaaattgatcacgttttagaccattttttcgtcggtattagataaaaatatgcaggcgagaaagggtaacggttatttttgacatacggtttatcccgaatggcgacggtcaagtactgacctgcaccatgacgggtagcaacatcaggcgatacgtcttgtacctctatattgagactctgaaacagagactggatgccataaatcaactgcgtgtggatcgcgcgcttgctgccatgggacccgcttttcagcaggtttacagtcttctgccgacattattgcactatcaccatccactgatgccgggttaccttgatggtaacgttcccagcggtatttgcttctacacgcctgatgaaacccaacgccactatctgaacgaacttgagctgtaccgcggtatgacgccgcaggacccgccgaagggcgagctgccgattaccggcgtttacaccatgggcagcacctcctcggtcgggcagagctgctcgtccgacctggatatctgggtgtgccatcagtcctggctcgacggcgaagagcgtcagttgctgcaacgtaagtgtagcctgctggaaagctgggccgcctcgcttggcgttgaggtgagcttcttcctgatcgacgagaaccgtttccgccataacgaaagcggcagtctgggcggggaagactgtggttctacgcagcatatcctgttgcttgatgagttttatcgtaccgctgtgcgcctggccgggaagcgtatcctgtggagtatggtgccgtgcgacgaagaagagcattacgacgactatgtcatgacgctctatgcgcagggcgtattaacgccaaacgaatggctggatctggggggcttaagctcgctctccgccgaagagtactttggcgccagcctgtggcagctatacaagagcattgactcgccgtacaaagcggtgctgaaaacgctgctgctggaagcctattcatgggaatatcctaacccacgtctgctggcgaaagatattaaacaacgtctgcatgacggtgaaatcgtatcgtttggactcgatccctactgcatgatgctggaacgggtcactgaatacctgacggcgattgaagatccgacgcggctggatttagtccgccgctgcttttacctgaaagtgtgcgagaaattaagtcgcgagcgtgcctgcgtaggctggcgtcgggaagtattaagccagttagtcagcgagtggggatgggacgacgcgcgtctgaccatgctcgataatcgcgcaaactggaaaatcgatcaggtgcgcgaagcccacaacgaattgctcgacgccatgatgcaaagctatcgtaatctgattcgctttgcgcggcgcaacaacctcagcgtgagtgccagcccgcaggatatcggcgtactgacgcgtaagctgtacgcggcttttgaagcgttgccgggtaaagtcacgctggtgaacccgcagatatcgccggatctgtccgagccgaatttaacctttatccatgtgccgccgggacgcgccaaccgttcaggctggtatctctacaaccgcgcgccgaacatggattccatcatcagccatcagccgctggaatataaccgttatcttaataagctggtcgcgtgggcgtggttcaacggcctgctgacgtcgcgaacgcatctgtttattaagggcaacggtattgtcgacctgcctaagttacaggagatggtcgccgatgtttcgcaccatttcccgctgcgcttgcctgctccgacgccgaaagcgctctacagcccctgtgaaattcgccatctggcgattatcgttaacctcgaatatgacccgacggcggcgtttcgcaataaagtggtccattttgacttccgtaagctggacgttttcagctttggcgaagagcaaaactgtctgataggcagtatcgacttgttatatcgcaactcgtggaacgaagtgcgtactctgcactttaacggcgagcaggcgatgatcgaagcgctgaaaacgattctggggaaaatgcaccaggatgccgcgccgccggatagcgtggaggtgttctgctacagtcagcatcttcgcggcctgattcgcacccgtgtgcagcaactggtctccgaatgtattgagctacgtctttccagcacccgtcaggagaccggtcgcttcaaggcgctgcgggtttccgggcagacgtgggggctattcttcgaacgcttgaatgtctcggtgcagaagctggagaacgctatcgaattctacggcgcgatttcgcataacaagctgcacgggctgtcggtacaggtggaaaccaaccaggtgaaattgccgtcagtggtggatggcttcgccagcgaagggattatccagttcttctttgaagaaacaggcgatgagaaaggctttaacatttatattctggatgaaagtaaccgggcggaagtatatcaccactgcgaaggtagcaaggaagaactggtgcgcgacgtcagtcgcttctattcgtcatcgcacgatcgcttcacgtatggctccagttttatcaactttaacctgccgcagttctaccagatagtgaaaaccgatggccgcgcgcaggtgatcccattccgtacgcagcctatcaacaccgtgccgccagcaaaccaggatcatgacgcgccgctattgcagcagtatttttcgtaagtgctgcgccgggcaaagctgcccggccggcgttcaccgcttcacattaacttcacccaacttcgttaccgtgacctccgcatttggtttacaggaggaggtttgaggtggcagatgcgttcattttgttagggatagtcatggcgatggtcagcctcggcttcattcttataaataagttattctgttttatatctgctgggtgcctgctctcgttatgcgccagcatggccagttttcaactctgggatgcatcttactgggggcgatggggaaaagtatgtcccggcctggatgtgatcatctcctgcgacaattaccattttctctatgacttgggatgggaattgtacggtatcgcctttttgttctttaccgcgttaatgctcacatgtgcggccattattcttatcaatatgattatggctttagagcgatactgtgccggatggcggcgctaacgcgccttatccagcctacattcgaagaatgctcattgagcggaacaaggtttagataatattttttcttatacaatttatgtagtaatattcagaccgttcaaaatgctatcgcgtccttcattgttttcgtaaatatgttttgaaaaactatattagaaacaaaagctctttaatggtttcttatggatgtttttataaaaggatattatatgtcaataaacaaccctattcttatttgcgtgaataagaaacgacaaataaaattagctctgttttattcagtggtagctatagctcttatgatgagcctctttctaaattatagtattatgctaaagatggtgtgtgtttttttaatactcctcatgatagcaggcgcaagtgcttactggtactccgccttttcaggaaagccacagctaacgttgaaccaggagggagtaacattacacacaaccaggctaccaatagtttactggcatgaaatcgactatgttggtgagcgtgttagcgataatacgcctgtgctggccatttttgtcaaagatgttgagctttattgtcagcgaattactaatgagaaaatgcgtaataattttctgtcattattgaataagcatgaaagtaatcgcgtgatgaatatctctctaaacgatctcgattatgactcagatgagttacaggatatttttaaaatggctgttgccagaaacctggaacaatagggtagagatatatgttttttgttattactcaccatattgatgtgctgcctctggcaaccctacccacacatgaaacatgcccttattgtaataatcaggatgtatggttgattattcgccaaaaaaggacccgtacatgtggtctgtctcaagcgagaaaaagagataagtttggtttagcgatatgcaatcattgcagcaatgaaatcaaggaaaaacgttggtcaccagcgttacgtcaactttttaccgagcagaagccactatttaacctaaccttttggcaacgctacggtttttgggttggttggttgagtgtatggcccgcgctgtttctggcaacctggctgtatttcacatttcggggttggtaatacgaccgcatatctcgttaaatatacgcaggaaagcgctattcttctggctctcctgcggaattaaaacttagcgaaaactcaccttttcacccgcttgttgcgttgccgcctgctccagcagatcccagaaggtttcgccgctgcgatcgcaaacccactcgtcgcctttcagatcgaaatgatagccgccctgtttggtcgccagccacacctggtgcaacggctcctgacggttaataatgatcttactgccgttctcaaagctgagggtcagcacgccgccgttgatttcgcagtcgatatcgctgtcgccgtcccagctatcgaggcgttcttcaatggtgagccacagggcgtcagccaggcgatgaaattcactgtcgttcattgttttatcccgctattgagtgatagcgccagtataaggggaagcgtcagcttctggaaccgatacgaattaccgttgtgagcggtaaaggataaaactcagcggtaggtaaatgacgataaatagcgcaccggtgataagtatgacggacgcgttaaccgggaaatggttcagagccgacagcattgccaccatcagtgcgacgcagccgccgcagaggagaaaatgcaacaggattaagggggcgcgcggctttgctttgatatccaaaagagcgctaagcagaccgagtaccgcgcttatcgtcaggactccggcagcttcaacaccgtttatcgtgccgtgcataatgctttcaataatgacgtaaatgcatgaaccgatccccacgccccgaagggcgtttttcaaatgtttaatcaagtgcgcaaaacggtttagcggcgtcatttttggcattccggtgcctgcgttatgatgatgatgtctttattgttggtgtacatgacgttcctattcagagtatgcgtcttatccgggcagggggatgctgttcggtaaagctggctgccaatccacgtataaactagcggttgtcatacgcaaaacgctcggtgacttttagcggcccattgatgctaaagacatgaataccctgaccttgctggctatcacgcataaaatagccatgctcttttccggcgttaatttcccggttcaggaagggggttgcgctatccagttccagccctgagttgccgggttaatcaatgaattgggtaaccgacgcaggcgtttgaaactcacctccggcaacgaaagattgttctcctcttctggctggagataaaccacgccgctgccttgccgctgataaacattgtgcggagattcactcagccggcatccccaggcgggaggcagcagaagtgaaagcgaaaaaaggcaaaacaaattacgatattgcataaggtcatccggacgtggtacgtaaacctaaagtgatgagcaaagcatgtttcctgatgtaaatgcgcaataatcatggcaacgcgccgcttttcagattttataaagagcccctaaacgcttgcttttacgccttctcctgcgatgatagaaaatagaaagcatgaacttacaggcaatccataatgaaaaacgtgtttaagacactcgctgtacttctgactctgttcagcctgacgggctgcggtttgaaagggccgctttatttcccgccagccgataaaaatgcgccgccgccgacgaaaaaagtcgattcgcaaacgcagtccacgatgcccgataagaacgatcgcgcaacgggagatggcccgtcccaggtcaattactgaggatagttttctgtccccgcgtgaacggagtgaatgatgcaattctctaaaatgcatggccttggcaacgattttatggtcgtcgacgcggtaacgcagaatgtctttttttcgccggaactgattcgtcggctatccgacagacacctgggcgtagggttcgatcagctgctggtggttgagccgccctatgatcctgagttggactttcattaccgcatcttcaacgccgacggcagtgaagtctcgcagtgcggcaatggcgcgcgctgtttcgcgcgatttgttcgcctgaaagggctaaccaataaacgcgacattcgggtcagtaccgcgaatggccggatggtactgagcgtcacggaagatgaactggtgcgggtgaatatgggggaaccaaactttgaacccgcgcaggtgccttttcgcgccaacaaagcggaaaagacgtatattatgcgagcggcggaacagaccatactgtgcggcgtggtttcaatgggcaatccgcactgtgtcattcaggttgataacgtcgacacggcggccgttgaaacactggggccggttctggaaagccatgagcgttttccggaacgcgccaacattggttttatgcaggttgtaagacgtgagcatatccggctgcgagtctatgaacgcggcgcaggggagacccgcgcgtgcggcagcggcgcgtgcgctgccgttgccgtggggattcagcaggggctgctggctgaagaagtacgcgtggaattaccgggcggtcggctggatatcgcctggaaaggtccgggtcatccgttatacatgactggtccggcggcacatatctacgacggatttatccatttatgaagcaaccagaggaagaactacaggaaacgctcacggaactggacgatcgagcggtcgtcgattacctgcgccaccaccctgagttttttatccgtaacgcccacgccgttgaagcgatgcgtgttccacatcccgtgcggggaacggtttcgctcgttgagtggcatatggcccgcgcgcgtaatcacatcaatgtgcttgaagaaaatatgacgctgctgatggaacaggctcatgccaatgaaagcctgttttatcgcttgctgcatctgcaaagccgtctggtcgccgcggatagtctggatgagatgctggtgcggtttcaccgctgggcgcgcgatttggggcttgccggcgcgacgctgcgtttgttcccggatcggtggcgtcttggcgcgccatcgcgctatacacatctggctttaaaccgtcaggcctttgagccgctgcgtattcaacggctgggacagtcgcagcattatcttggcccgctaaacggcccggaactgctggtggtcttgccggaggcgaaggctgtaggctcggtagccatgtcgatgatgggcagcgatggcggcctcggggtgattctcttcagcagccgtgacccgcatcactatcagccgggacaggggacgcagcttttacaggagatcgcgctgatgctgccggaactgctggaacgctggattaaacgcgtatgacggatgtcgcgctttctcaggatgtctcgcggttcctgcgctatttaggcgtggagcgccagcttagccccattaccctgctgaactaccagcgtcagcttgatgccattatcgctttagccggagaaaccgggctgaaaagctggcaacaatgtgacgctgcgattgtgcgcagttttgcggtgcgcagtcggcgcaaagggcttggccctgccagtctggcgctacgtctctcggcattgcgaagcttttttgactggttagtcagtcagggcgaattgaaagctaacccggcaaagggtgtctccgcaccgaaagcgccgcgtcatctgccgaaaaatattgatgtcgacgacgttaaccgcctgctggacatcgatcttaacgatccgctcgccgtacgtgatcgggcgatgctggaggtcatgtacggcgcggggctgcgtttatccgaactggttggcctggatataaagcacctcgatctcgataccggagaagtgtgggtaatgggtaaaggcagcaaagagcgacgcctgccgattggccgtaacgcggtgacgtggattgagcactggttggatctgcgcggcctgttcgccagcgatgaagaggcgttattcctgtcgaagctcggcaagcgtatctccgcgcgcaatgtccaaaaacggttcgccgaatggggcataaagcaggggctaaacagccacgtgcatccacataagctgcgccattcgttcgcgacccatatgctggaatcgagcggcgatctgcgcggcgtgcaagagctgctgggtcatgccaacctttccaccacccaaatttatactcatcttgattttcaacatcttgcttcagtgtacgacgcggcgcatccgcgcgctaaacgggggaaataatgcgtttttaccggcctttggggcgtattgccgcgctcacctttgacctggatgataccctttatgataaccgtccggtgattttgcgtactgagcaggaagcgctcgcttttatgcagaattatcacccgtcgctacgttcgtttcaaaacgtcgatttacagcggatacggcaggcggtgcgtgaagcggagccggaaatctatcatgacgttacccgctggcgccatcgcgcgatagagcaggccatgcgggatgcgggattatcggcgcaggaggccattgccggcgcgaatgcggcgatgatgcattttgccaaatggcgcagccagattgaggttccgcaggctacccatgagacgttacagcagcttgcgaaaaaatggccgctggtggcgatcactaacggcaatgcccagccggaactgtttggcctcggcgattactttaagtttgtactgcgcgccggcccggatggacgttccaagccctttagcgacatgtatttcctggcggcggaaaaactgcatgtgccgatcggcgagatcctgcatgtcggcgatgatctgactaccgatgtggctggcgctattcgctgtgggatgcaggcctgctggattaaacctgaaaatgccgacctgatgcggacgcaggacagccgtttactgccgcatatcgaaatttcgcggttggcatctctcacctcgctgatataatcaccagtagttctgtataaattcccagttattctggcggatggcgctatgcttatccgccctacgataagtagccccggtaagcgaagcgccaccgggcgtttttagttttcatgtttttacgcggcggtgccaatggacgtttcttacctgctcgacagccttaatgataaacagcgcgaagcggtggccgcgccacgtagcaacatgctggtgctggcgggcgcgggaagcgggaaaacccgcgtgctggtgcaccgtatcgcctggttactgagcgtagaaaacaactcgccatattccatcatggcggtgacctttaccaataaagcggcggcggaaatgcgccatcgtattggccagttgatggggaccagccagggcggaatgtgggtagggacgttccacggtctggcgcaccgcctgctgcgcgcgcatcatatggacgctaatttgccgcaggatttccagattctcgacagcgaagatcagatgcgtttgcttaaacgcctgattaaggcgatgaatcttgatgagaagcagtggccgccgcgtcaggcgatgtggtacatcaatagccagaaagacgaagggctacgcccgcaccatatccaaagctatggcaacccggtggagcagacctggcagaaggtgtatcaggcctatcaggaagcgtgcgatcgcgctggtctggtggattttgccgagctactgctgcgcgctcatgaactatggctgaacaagccgcacatcctgcaacactatcgcgagcggtttactaacatcctggtggacgaattccaggataccaacaacattcagtacgcctgggttcgtctgctggcgggcgataccggtaaggtgatgattgtcggcgacgatgaccagtcgatctacggctggcgcggggcccaggtagagaacatccagcgcttcctcaatgatttccccggcgcgcagaccattcgtctggagcagaattaccgctcgaccagcaacatccttagcgcggcgaacgctctgattgagaataacaatgggcgtttgggtaaaaagctgtggactgacggcgttgacggcgaaccgatatcgctgtactgcgctttcaacgaactggatgaagcgcgctttgtggttaaccgtatcaaaacctggcaggacaacggcggcgcgcttgcgcaatgcgccattctttatcgcagcaacgcccagtcgcgcgtgctggaagaagcgttattacaggccagtatgccgtaccgcatttacggcggtatgcgcttcttcgaacgccaggagatcaaagatgcgctctcttatctgcgtttgattgccaatcgcaacgatgatgccgcctttgaacgcgtggtgaataccccaacgcgcggtatcggcgaccgcacgctggacgtggtgcgccagacctcgcgcgatcgccagctaacattgtggcaggtgtgccgtgaattgttacaggaaaaagccctggccgggcgtgcggccagcgcgctgcaacgctttatggaactgatcgacgccctggcgcaggaaaccgccgacatgccgctgcatgtgcagactgaccgggtgatcaaagattccggcctgcgcaccatgtatgagcaagaaaaaggcgagaaaggccagacgcgcatcgaaaacttagaggaactggtgacggcaacgcggcagttcagctacaacgacgaagatgaagatttgatgccgttgcaggccttcctctctcacgcggcgctggaagcgggcgaggggcaggcggatacctggcaggatgcggtacagctgatgacgctgcactcggccaaaggcctggagtttccgcaggtgtttatcgtcgggatggaagaggggatgttccccagccagatgtcgctggatgagggcgggcgtttggaagaggagcgtcgtctggcctacgtcggcgttacccgtgccatgcagaaactgacgctaacctatgccgaaactcgccgtctgtatggtaaagaggtttatcatcgcccgtcgcgtttcatcggcgagttgccggaggagtgcgtggaagaggtccgtctgcgcgccaccgtcagtcgtccggtgagccatcaacgaatgggaacgccgctggcggaaaacgacacaggctacaaactcggccaacgcgtgcgccatgcgaagttcggcgagggaactattgtcaacctggagggcagcggcgagcatagccggttgcaggtggcttttcaggggcaagggatcaaatggctggttgccgcgtatgcgaagctggaaacggtttgaccgactctcatagtgccggatggcgcgtcttatccggcctacgcgctggctaacattttgatttgtaggccggataaggcgaagccgccatccggcgatatattgatgttaatattctgaaatcatagataaatactctcactctgctaacctttctgcataaggggaaattattgctttttcgcgtttcgttgcgtgttgacggcaaatttttgctggcgtaacatgcgcccacgattacgctaagaggacattcgccttggacacacccagtagatactggctcattatcctgtcatccaggatcaactcctaaggctatccctttttgctgatagccttagcggttgtcagcgacctttcattttttcccgtcgcgttgagtcaggctgtttaatggtctgaaacccaatttgtttctgtgtgcccatctgaactgtccgatatttttacgcattgggagtcccggtcatgctgagcgcatttcaactggaaaaaaaccgactgacccggctggaagtcgaggagtcacaaagcctgattgatgccgtatgggtcgatttggtcgaaccggacgacgacgagcgattgcgcgtacaatctgagctgggccagagtctggcaacgcgtcctgaactggaagatatcgaagcatccgcgcgcttctttgaagacgaagacggactgcatatccactccttcttcttcttcgaagatgcggaagatcatgccggtaactctacggtggcattcactattcgcgatggccgtctgtttacgctgcgtgaacgcgaactgcccgccttccgtttgtatcgtatgcgcgcccgcagccaggcgatggtcgacggtaatgcttatgaattactgctcgatctgttcgaaactaaaattgaacagttggcggatgaaatcgaaaacatctacagcgatctggaaaaactgagccgcgtcattatggaagggcatcagggcgatgaatacgacgaagcgctctccacgctggcggaactggaagatatcggctggaaggtacgcctgtgtctgatggatacccaacgcgcgctgaacttcctggtgcgcaaggcgcgcttaccgggcggacagctggagcaggcgcgtgagatcctgcgcgatatcgaatctctgctgccgcacaatgaatcgctgttccagaaggtgaacttcctgatgcaggcggcgatgggtttcatcaacatcgagcagaaccgtattatcaaaatcttctcggtggtttccgtggtgttcctgccgccgacgctggtcgcttccagctatgggatgaacttcgagtttatgccggaactgaagtggagctttggttatccaggcgcgattatctttatgattctggcggggcttgcgccgtatttgtactttaagcgcaagaactggctgtaagacattaaggccagggtgattcagctgcggctgaaccaccctgaaaagttacaggctccaggtattgatacctttaacctctttttcatagaaccacttatttgtattgacgccgacataagctgcgacaacaagtccaagtatgttaacgccgattaatgctccaataaatattgcaacgatccctaataaaataactataattgcttttttccacagacccagtacaaacaaataaatccatgagaagaaaaaggcaataaagtttatttgaatagtcaaccgttgtcggggctttaatgctttaaatgcctgtttatattctgggcttactttccaaaatccagggaaaccatgttgatcgtaaaatgaaaaacggtatttccatttttcagatagcgaaccatcattaatataatccttgtccatgtaaactccattaaattacttgttgagtgaattcgaatccgggggggccagaagtagcagagaaaaggttgcaaaataccagattagaaaaagaggcataccaaagccatcgcaagcgaaatcttcagcaaccattatcacgaaggaggcaatatagattacaagcgtaccccatacatagaattttatatattcaaagccactgtctctgaatcgctgacagtttaaattaatgacgagataatgtagtaaaattgtgaataaaattgccagtatcacaaagcttaaatataataaaaccccaaccaaaatggaaaatattatatttattagcgcgaatgataataaataacgacatctggaaacacatctctcagatgaaggaataaaaacacttaacattaatttcacatccatatgttgggttacgtcgttagcatgacaatatgctaccccccttacaaggggaggcatattttttcagattatatttagaataatagtcgcgttattttttacgctgcgtataaatcgcatccatcacgaaaatcgccagcgcgacccagataaacgcaaatgtcaccatcttatccgcgcccggcacttcgccataaaacgtcaccgccagtaaaaacatcagcgttgggccgatatactggaaaaagcccagtgtagaaagacgcagacgcgtagccgctccggtgaagcacagcagcggaatcgtagtgaccacacccgccgccattaacagcaagttcaacgatagtgcgttttgccccatatggctggtagggctatcggcgatgccaaacagataaatcgcggcgaccggcaacagccatagcgtttcaaccagcatacccgtctgcgcttcaacggcgatcttcttacgcaccaggccgtaaaacgcaaaactaaacgccagccccagcgcgataatcggcagcgagccaaaggtccagagttgcaccagcacgccgcacaccgccagaatcaccgccagccactgcattcgacggaagcgttcgccaagaaaaatcatccccagcaagatgttaaccagcggattaatgaaataacccaggctggcctccagcatatggtgattatttaccgcccaaatgaacaatagccagttaccgccgaccagtacggcggacagggccagcaggaaaatcttctttggcgttttcagtaagcgcttaacctgtcgccactgccggctgacgctaagcagcgccaccataaagaaaaatgaccaaatcacgcggtgcgtcaggatctcatctgcgggaacgtaatagatcagcttgaaatacgcgggggcgatcccccaaataaaataggcggcaagagcgagtaatacgccctgccgtgtttgttttgcgtccatccggaaaactcgtatctgaagtgtaacaacagtttacctgcttttatcccaccatataagtagcggtggcgctggcgatgtacagctgatcttcattgtgtaattccacgcgggcgacggccactttattccctgcgcgcagcaggctactggtggccgtaaagcggttgcctctgcccggacgcaggtaatcgacgcgcaggtcaatcgttcccatccgcgacaggcgctggcgtagttcatcttcgctgatggtttcgtggcgagttagcgtgctgccgacgcataccagtccggcggcgacatccagcgcagaggcgatcacgccgccgtgtaaaatgctttgcgcccagttgccgaccatcatcggctggttgttgaaggccagttgggcgaacgctttttcatagcgttccagctccagccctaacgcccgattaaacggcatgtggtagacaaacatttcacccactaatttcagagcttgttcagcggtaagtacagcggacatagattcctgacacctcattagttaatgaaatgttgatattatgcttcttaattgttgttttctactttaagaagggataactaacggctatgtgtgtaaatatgtaaaaatggttggcagagaatgattcaagctgaaaatacttcgtcaggagaacgtcaagaatgcgggcgattttgagagggttgttgccagccacgctactgccattagcggcatatgcacaagaagctacgataaaagaggttcatgatgcgcctgcagtacggggaagtatcatcgctaacatgctacaggagcatgataacccttttacgctttacccttatgacacgaactacttgatctacacgaacaccagcgatctgaacaaagaggccataagtacctacaactggtctgaaaacgcacgtaaagatgaagtgaaatttcagttgagcctggcgtttccgctgtggcgcggaatactggggccgaactcggtactgggcgcttcctatacgcagaaatcctggtggcagctttccaacagtaaagagtcttcgccgtttcgcgaaaccaactacgaaccgcagctttttcttggttttgctaccgattatcgctttgccggctggacgctgcgcgacgtagagatgggctacaaccatgactctaacggacgttcggaccccacctcgcgtagctggaaccgtctgtatacccgtctgatggccgaaaacggtaactggctggtagaggtcaaaccgtggtacgtgattggcagtaccgatgataatccggacatcaccaaatatatgggttattaccagcttaaaatcggttatcacctgggcgaggcggtattaagcgccaaaggccagtacaactggaatacaggctacggcggcgcggaagttggattaagctatccggtcactaaacatgtccggctttatacccaggtgtacagcggctatggcgaatcgctgatcgactataattttaatcagacacgtgtcggcgtcggcgtgatgcttaacgatatcttctgattggattgtgttttaaacattgcagtttctctcgcaggcgctgaaaatagcgcctgttttgatttatggtgaacggggttaatgtggcgcaggcggaagtgttgaatctggaatcaggggccaaacaggttttgcaggaaacctttggctaccaacagtttcgcccgggtcaggaagcgattattgatactgcgctctccggtcgcgactgtctggtcgtcatgcccaccggcggcggcaaatctctgtgctatcaaatccccgcgttgttgctggacgggttgactgtcgtcgtttcgccattaatctcgttgatgaaagaccaggtcgatcagctactggcgaacggtgtggcggcggcgtgcctgaactccactcaaagccgcgagcagcagcttgaggtgatggcggggtgccgtaccggacagattcgtctgctgtatattgcgccggaacgcctgatgctggacaactttcttgatcatctggcgcactggaatccggtattgctggcggtggatgaagcgcactgtatctcgcaatggggacatgatttccgtccggaatatgcggcgctcggtcagcttcgccagcgttttcccgctttgccgtttatggcattgaccgccaccgccgacgacaccacgcgccaggatattattcgtctgcttgggcttaacgatccgttaatccagattagtagctttgaccgaccgaatatccgctacatgctgatggagaagtttaagccgctcgaccagttaatgcgctatgttcaggagcaacgcggcaaatcgggtatcatctactgtaacagccgggcgaaagtggaagataccgctgcgcgcttgcaaagtcgcggcattagcgcggcggcctatcatgcggggctggaaaacgctattcgcgtcgatgtgcaggaaaaatttcagcgcgacgatctgcaaatcgtggtggcgaccgtcgcttttggaatgggcataaacaaacctaacgtacgtttcgtcgtgcatttcgatatcccgcgcaatattgaatcctactatcaggaaacgggccgcgccgggcgcgacggactgcctgcggaagccatgctattttacgatccggctgatatggcctggctacgtcgttgtctggaagagaaaccagccggacagcttcaggatattgaacggcataaactgaatgcgatgggcgcttttgctgaagcgcaaacctgccgccgcctggtattgcttaattactttggcgaaggccgacaagaaccgtgcggcaactgcgatatctgtctcgatccgcccaaacaatatgatggcttaaacgatgcccagattgcgctttctaccattggtcgggttaaccagcgttttggcatgggctacgttgtcgaggtgatccgcggcgcgaataaccaacgcatccgcgatttcggtcatgacaaactcaaggtttatggcatgggacgcgaaaagagccatgagcactgggtgagcgtgattcgccagctcattcatctggggctggtaatgcaaaatattgcgcagcactccgcattacagttgacggatgccgcgcgtccggtactccgtggagacgttccgctaaagcttgcggtgccgcgcatcgtcgccctcaaaccccgcgtgatgcagaaatcgttcggcggtaattacgatcgcaaattgttcgctaagttgcgcaagctgcgtaaagctatcgctgatgaagagaatatcccgccgtatgtggtctttaacgacgccacgttgatagaaatggcggaacagatgccggtttccgccagcgagatgttaagcgttaacggggttgggatgcgcaaactggagcgcttcgggaaagaatttatggcgctcatccgcgcgcatgtcgatggtgatgacgaagagtagtcagcccggcaaaaaagtgccaggatggtgactcactgaactatttccccgcgagccatttttatgatgatgctatttttcaccgtggcaatggtgcacatcgttgcgctaatgagccccggccccgactttttcttcgtgtctcaaactgctgtcagccgttcgcgtaaagaagcgatgatgggcgtactgggcatcacctgcggcgtgatggtatgggcgggcgtggcgctgcttggcctgcatctcatcatcgaaaaaatggcctggctgcatacgatcattatggtaggcggcggcctgtacctgtgctggatgggctatcagatgctgcgcggcgcgctgaaaaaacaggatgcggcggcgtcttctccgcacattgaactggcgcagagcgggcgcagctttctcaaagggctgctgaccaatctgtcgaatcctaaagcgattatctattttggttccgttttttcactttttgtcggcgataacgtcggcgctgcggcgcgctggggtattttcgcgttaatcaccctggaaacgctggcctggtttaccgtagtcgccagcctgttcgcgctgccgaaaatgcgccgtggctatcagcgtctggcgaaatggattgatggctttgccggcgctctgtttgcgggctttggtattcacctgattatttcgcgctaatttacctccgggccggataaacatcatccggcacgactatcacgcgtgtcttgccgacgccaggagcgcgcctaccagcataaacaacgaaccaaacgctttattcagcgccttcatctgctttggtcctttaatccaggcggcaatgcgctgcgccagtgtggcgtaaccggtcatcacaaccatatccaccacaatcgtggtgacgccgagaatgaggtactgcgccagttgcggttgctgcggcatgatgaattgcggaaacagggcggcaagaaagacaatacttttgggattggttagattgacaaatatcgcccgtttgaacagccgaccccgcgattgcgtctgggcgagggtatgcagatcgatagcgcctgcggcgcgccattgctggatacccagccagataagataagccgcgccagcccatttcagaatttcaaaagcgaggagcgagcgcgaaaagagcgtacccagtccgacgcccaccagtacgatatgtatccccagcccggtctggagtccggcgatagaagccactgcgccacgatatccatggttgatagacgtcgtcatggtattgatggcgcctgaacccggagaaagactcagcagagttgaggtcagtagataggcgaaccaccattcaaaggtcatgcgaaactccctggttgtctgtttttgtgccacaatacgctactgccgctgtgttgtgtcaggcacgacgcaaaaaacgattttacctggtaaacgaggccgaaaacccgatgtttcagcagcaaaatgactgggaaacaagagaaaatgcgtttgccgcttttgctatggggccgctgaccgatttctggcgtcagcgggaagaggcggagtttatcggcgtgggtaacattccggtgcgctttgtccgttttcgaaatgattccaacgatcggacgatcgtcatttgtcctggccgcattgagagttatgtaaaatacgctgaactggcgtatgacctttttcatctcggttttgatatcttcatcatcgaccaccgtggtcaagggcgctccgggcggatgttatcggacccgcatcggggtcatgtcgatcattttaacgattatgttgaggacttagcggcgttctggcagcaggaaattgagccggggccgtggcgtaagcgttatatcttggcgcactcaatggggggcgcgatagccaccctgttcctgcaacgccatcgtgtgcggtgcgacgctattgcgctcaccgcgccgatgtttggtattgtgatacgcttgccttcctttatggtgcgccatattctcgactgggccgaagggcaccagcgtatccgtgaagattacgctattggtaccggtcagtggcgggcgttgccgtttgggatgaatgcgctgacccacagccgccagcgttatcagcgcaacttacgattttatgccgacgagccgcagctgcgcgttggcggccccacctggcattgggtacgcgaaggcattctggcgggtgagcaggtactggctggggcgagcgatgacacgacgcctacgctactgattcaggcggaagaagagcgggtagtggataaccgcacccacgatcgtttttgtgaaattcgcgccgcggcgggatacccttgtgaagggggaaaaccgctggttatcaaaggcgcgtaccatgagatcctttttgaaaaggacgccatgcgctcagtcgcgcttaacgccattgttgaatttttcaacaagcctaatttatccagcggaaatcgctttgcttagaggttaaattttattatgtatcaggttgttgcgtctgatttagatggcacgctgctctcccccgaccatacgttgtccccttatgccaaagagactctgaagctgttgaccgcacgcggcatccattttgtctttgccactggtcgtcatcatgtcgatgtagggcaaatccgcgataatcttgaaatcaagtcttacatgatcacctccaacggcgcgcgagtgcacgataccgacgggagtttggtttttacgcataatctggacagcgacattgccagcgacctgttcggggtggtgaatgcgaacccggacatcgtgactaacgtttatcgcgacgacgaatggtttatgaatcgtcatcgccccgatgaaatgcgttttttcaaagaggcggtatttaactactcgctgtttgagcctgcgctgctggagccggagggcgtcagcaaagtgtttttcaccagcgacactcatgaaaagttgttgccgctggagcaggcgattaacgcgcgctggggcgatcgggtaaacgtgagcttctctacgctaacctgtctggaagtgatggcgggcggagtgtcgaaaggtcatgcgctggaagcggtcgctcaggcgatggggtacagtctgaaagagtgtatcgcctttggcgacggaatgaacgacgctgaaatgctcacgatggcgggcaaaggctgcatcatgggcaatgcgcaccagcgtctgaaagacctgtatcccgaacttgaggtgatcggcatcaacgcggataacgccgtgccgcattacctgcgcgatcttttcttacgctgatgtgattgtttgttagttgaccagttgtcaacttcactctccgctacaatgggtgttccctgttttaagagacatccattgtggcgctactcatcattaccactatcctgtgggctttctcctttagtttatttggcgagtatcttgccgggcatgtcgatagctatttcgcggtgctgatacgcgttgggctggcggcgctcgtttttctgccgtttttgcgtactcgcgggcacaacctaaaaaccatcagcctgtatatgctggtgggggcgatgcagcttggcatcatgtatatgttgagcttccatgcttacctctacctgaccgtatccgaactgctgttgtttaccgttctgacgccgctctatatcacgctgatttacgatgtgatgagtcagcgtcgtttgcgctggggctatgcatttagcgcgttgctggcggtgattggcgccgggattattcgctacgatcgcgtgaccgaccatttttgggtcggtttgctcctggtgcagctttctaatatcagtttcgctatcggaatggtggggtataaacgtctgatggagacccgtcccatgccgcagcacaacgcctttgcgtggttctatctgggggcgtttttggtggcggcggtggcgtggtcgctgttggggaacgcgcaaaagctgccggaaaccacgctgcaatggagcattctggtgtttctcggcgtggtggcgtcaggcattggctactttatgtggaactatggcgctacccaggtagacgccgggacgctgggtatcatgaataacatgcatgttcccgcaggactgctggttaatcttgccatctggcatcagcagccccactggccaagctttattacaggcgcggctgtgatcctggcttcgctgtgggtgcatcgaaaatgggtcgctccgcgctccgcacaaacggcagatgatcgcaggcgtgatcccgcgtcgagcgaataaacgcctcggtcaccgcctgacgctggtcgccgtcgcgcacggcggcatacaggcggctccacagaccatcgccaagggttttggtcaccaccagaccctggcgctcaacgctttccaccacccagtgcggcagggcggcaatacccattctggccgccaccatctgaatcagcagtagcgtattatccacgcttttcagcagcggactgatacccgccggttgcaggaaatgtcgccagacatccagtcggctgcgctgcaccgggtaaatcaacagcgtttcgctggctaaatcttccggcgtaatctgcgttttgctggccagcggatggtcgggcgccagcaccagtcggacttcaaaatcaaacatcggcgaataatgcagtccgctacgcggcaaaatatccgacgtcatcaccaaatccagctcgccttgttgcaaggccggttgcggatcaaaagtgacgccggaggtgaaatccatttctacctgcggccagcttgcacggaagttttccagcgccggggtcagccactgaatacagctatgacattcaatagcgatgcgcagacgagtttgctgcggttcgttgcacgcctgcagcgcacggctgatttgcggcagcacttggtttgccagttgcagcagaacttccccctgcggcgtaaagcgcagcggctggcttttacgcacgaacaggcggaagccaaggcgttgttccagatcgctgaactgatgagacagagcggattgggtctggtgcagcaccgccgccgcggcagccagcgatccactattccgcaatgcctggagtgttttcagatgtttaatttcgatcatgaaagtccttcacttcgccatgaacaaattgcgcttgaggaatatacagtacctttacattatggatgtgtaaacatccagacgtctaaaactcgtcatatttcgacttgcagatgcgttggcttccttgcttaccccagtcacttacttcagtaagctcctggggatgcgctgtgtcgccgccttcctgcaagccgaactatttagagttttactttcagattcaataaaataagagaggaagtaaaatgacaatattgactcatacccttggttttcctcgcgttggcctgcgtcgcgagttgaaaaaagcgcaagagagctactgggcggggaacacaacgcgtgaagcgttactggcggtggggcgcgaactgcgcgcgcgtcactgggagcagcagaaacaagcgggtattgacctgttaccggtaggcgactttgcctggtacgaccatgttctgaccaccagcctgctgttaggcaatgtgccggctcgtcatcagaacaacgacggttccgtggacatcgacactctgttccgcattggccgcggtcgcgcgccaaccggcgaaccggcggcggcagcggaaatgaccaaatggtttaatactaactatcactacatagtaccggagttcagcaaaggccagcagttcagactcacctggacacagttgctggaggaagtggacgaagcgctggcgctggggcataagatcaaacccgtactgctggggcctgtcacgtatctgtggctgggtaaagtgaaaggcgagccgtttgaccgcctgacgttgctgaaagacattttgccggtgtatcagcacgtactggctgaactggcaaaacgtggtattgagtgggtccaaattgatgagccagcgctggtgctggaactgccgcaggcgtggctggatgccttcaaaccggcttacgacgcgctcgccggccaggtgaagctgttgctgacgacctattttgaaggcgtgacgccaaacttggacactattatcgcgctaccggtacaggggctacatgttgacctcattcatggcaaagatgatgtagcggaactgcatcaacgtctgccggtcgactggctgctctccgcaggcttgattaacgggcgtaatgtctggcgcgccgatttgaccgaaaaatacgcgcagattaacgccattgtgggcaaacgcgcgctgtgggtagcatcctcctgctctttgctgcacagcccgatcgatctcagcgtcgaaacgcgtctggatacggaagttaaaagctggtttgcctttgcgctgcaaaaatgcggtgaactggcgttgctgcgcgatgcgctgaacagcggcgaaacggcggcgcttgaggaatggagcgcaccgattcaggctcgtcgtcactcccgccgcgtacataatgccgcggtagaaaaacgcctggcggcgatcaccgcgcaggacagccagcgtgagaatccgtatgaggtgcgcgctgaagcgcaacgcgcccgctttaaacttcccgcctggccgacgacgactatcggttcgtttccgcaaaccacggagattcgcggtctgcgtctggacttcaaaaagggcaacctcgacgcgaaccactaccgcaccggcatcgccgaacatatcaaacaggctatcatcgagcaggagcgtttagggctggatgtgctggtacacggcgaagccgagcgaaacgacatggtggaatacttcggcgagcatctggacggcttcgtctttacccagaatggttgggtgcaaagctatggctcccgctgtgtgaaaccgccggtagtgattggcgatatcagccgtccggcaccgattaccgtggagtgggcgaaatatgcccagtcgctgaccgacaagccggtaaaagggatgttgaccggcccggtgactattctttgctggtcattcccccgcgaagacgtgacccgcgaaacgattgcgaaacagattgcgctggcgctgcgtgatgaagtcgcggatctggaggcggcggggatcgggattattcagattgacgaaccggcgctgcgtgaaggtttaccgctgcgtcgcagcgactgggacgcctatctggaatggggtgtggaagccttccgcatcaacgcggcggtggcgaaggatgaaacccagatccacacccacatgtgttactgcgagttcaacgacattatggattcgatcgccgcgctggacgcggatgtgatcaccattgagacctcccgctcggatatggagttgctggagtcgttcgaagcgttcgactacccgaacgaaatcgggccgggcgtgtacgatattcactcgccgaacgtgccgagcgtcgagtggattgaagccctgctgaagaaggcggcacaacgtattccggcacaacgcctgtgggtgaatccggactgcggtctgaaaactcgcggttggccggaaacccgcgcggcgttagcgaacatggtcaaagcggcgcacaatctgcgtcaggcgaaataacccatcctggccgctgcgtttatccggcagcaatgcggcgctaccctttgacgggtagcgcccgtgcctgacctgattaacagcgcctctatctcctcttttttctcatttccctttttcttattttccgcgctgtctttttcaggatctggctatttggcgatcttgataataaaaaggttctccgtatgaatgacaaccaggcggatagcgtccccggaagcagagcggcggcttttattgcctcgcagatcgtttttcctgtcatgatcgcccagcgctctcatagcacaaaacgaggttttccattctgttatgttccctggcgacgataaacgtcgcattgtctcatggcgctggtgaaccttattttttaacggagatgtctgacatggcggtagcaggttgtcacgtaatggccaaacccggcggcgcgatctgcaatattgattgcacatattgcttctatcttgaaaaagaggcgctgtacccggaacgcaataaaaactggcggatgtcggacgagacgctggaacaatttatacgccagcatattgccgcgcagagtggcgaccgcattgactttgcctggcagggcggcgaaccgaccatgatggggctaccgtttttccgtcgggttgtcgcattatgtgaaaagtacggcgatgggcgaaaaatcactcatgcgttgcagacgaacggcatcctggtgaatgacgagtgggcgcgctttttcgctgaacagcattttctcatcggtctctctatcgacggcccggcgtcgttacacaaccactatcggtttaatcgcgctggaaaaggaactcatgaacaggtcgtcgcagccatggcgcggcttaaagcgcaccatgtcgactttaataccttaaccgtcgtgggaaaacataacgtcggtcatgcagcagacgtctacgaatttcttctggcggcgggatcgcgttttattcagtttatcccgctggtagagcgaatgagcaccgataactcatcggtacttaatctggtgatgcccggcgaaagcgcggcgacgctggcgccatggacggtaccgtcgtggcaatatggcgaatttctcaaccagatctttgatatctgggttcgtcgcgacgtagaccgcgtctatgtgcagatgtttgacgtggcgttagccgcctggacggcgcagcagccggtactgtgtgtacattccgagacttgtggacatgccttcgcgttggagtcgaacggcgatctctacaactgcgaccactttgtctacccggagcatctgctgggaaatatccaccagcacagcatcaaagccttaaataatagcgagcgggctattgcctttggcgaggccaagcgggagaccctgaccgccgattgtcgtcgctgtgactaccgctttgtatgtcatggcggctgtcctaagcatcgctttgccgtctcgccgtctggtcatcctgcgcataattacttgtgtgcgggctataagcattttttccagcacgttacgccgtatatgaatgtctggcgggagctgctggcgcaaggctatccgatggcatcgatcatgcgctggctggcgcaggacgcgcgtaaagacacaggagccgtcagtcgtaaccatccctgtccctgcggcagcggcaaaaaatataaaaaatgctgtggtaaagcatagctaacgtggcgatgacgctttgttgagcctacaccgactccggtctcgtaggcccaacaaacatcgtaatgcgctgtggttagccttttttcccaccgtactgcgcgaaccattccagcattctttgccagccgtctttcgctgaggcttcgtggtagcccggacgataatcggcattaaacgcgtgccctgcatcgggatagaccacgatttccgccttcgcattagcggcgcgtagcgcctgacgcatggtttccacgctctcctgtggaatactggtatcctgcccgccgtataaacccagtaccggcgcgttaagatcggtggcgatatcaacgggatgcttcggcgaattgagtgacgtgtcgcccaccagcttgccgtaccatgctaccgccgcttttaactgtgggttgtgcgcggcgtacagccaggtaatccggcctccccaacaaaaaccggtgatcatcagccgatgcgcatccccgccgttgcgcgaagcccaactggcgacgtgatccaggtcggcaaggacttgcgaatcgggtactttagccaccagcccgctcaataatgtgggtatatcggcgaaatcattggggtcgccttcgcggaaatagagctccggcgcgatagcgagatagccttccagcgccagtcgtcggcaaatatcgcgaatgtgttcatgtacgccaaaaatttcctgtaccacaatgaccaccggcagcgcgccgtcgctcgcttttggtctggcgtaataggcgggcatatcgtcgccctgagagggaatcgacgttatccccgcgctaatggccccatcaggcgtatgaatcatcgtaggggcaagtggggaggctgcaggtgcaaagccggatggatgtgtcgttgtcatggtattctccgtacccttaaaaaatagcgcaatcttaactatagacagtgtgtaacaaaccacattgccttaaagcggctatcttttgtgcaatgcctggcgatattgattatttattgtgatgaacatcactttttaatggtaagcgagtgcaattgttttacgtcatagtgatggctgtcacgaaaatatctttatgccttaggtaaagtgtctctttgcttcttctgacaaacccgattcacagaggagttttatatgtccaagtctgatgtttttcatctcggcctcaccaaaaacgatttacaaggggcccagctcgccatcgtccctggcgatcctgagcgtgtggaaaagatcgccgcgctgatggataagccggttaagctggcatctcaccgcgaattcacctcctggcgcgctgagctggatggcaaagcagttatcgtttgctctaccggtatcggtggcccgtctacctctattgccgtggaagaactggcgcaactgggtattcgtaccttcttgcgtatcggcaccacgggggctattcagccgcacattaacgtcggcgacgttctggtaacgaccgcatccgtacgtctggatggggcgagcctgcattttgcgccgatggaattcccggcggttgccgactttgcctgcaccactgcgctggttgaagccgcgaaatcgattggcgccacgactcacgttggcgtaaccgcctcttccgacactttctatccgggtcaggaacgttacgacacctattctggccgcgttgttcgtcgcttcaaaggctctatggaagagtggcaggcgatgggcgtgatgaactacgaaatggaatccgctacgctgttaaccatgtgcgcaagccagggtttacgcgcaggtatggtggcgggcgttatcgtcaaccgtacccaacaagagattccgaatgcggaaacgatgaaacaaactgaaagccacgcggtgaaaatcgtcgtggaagcggcccgtcgtctgctgtaattctcctctcttttgcaaaggccgacgcgttcggccttttctttttgcgtggcgcctcgcaggaaatcccttttaaactggacgtttatacagcacaattctattttgtgcaggacagtgtggttccaggagaggtgttgtggatattactcttatgataagcgccgtcgtggcgctggcggctggggcggtgattggctggctggcgacgaaagcgcacgccgatcaaatccgcgccgatcttatcgaagaacggcgtgagctggatatcgaacttagcgcggcccggcagcaattagcgcaagaagcgcactggcgcagtgaatgcgagttacttaataacgaactgcgtagcctgcacagtattaatacctctctggaagccgatctgcgtgaagtcacgacccgtctggaagcgactcagcaacacgcggaagacaaaatccgtcagatgatcaacagcgaacagcgtttaagcgagcagtttgaaaatctggcgaaccgtatctttgaacacagtaatcgtcgcgtagacgaacaaaaccgacaaagcctgaatagcctgctgacgccgctgcgtgagcaactggacggttttcgccgccaggttcaggagagttttggcaaagaagcgcaggagcggcatacgctggcgcacgaaattcgtaatttgcagcagcttaacgcgcaaatggcgcaggaagcgatcaacctgacgcgcgccctgaaaggggacaataaggcgcaaggaaactggggcgaagttgtgctggcgcgggtgctggaggcatccggactgcgtgaaggctacgaatacgaaacccaggtcagtattgagaacgatgcgcgctcgcggatgcagccggatgtcatcgtccgcttgccgcagggcaaagatgtggtcatcgacgctaaaatgacgttggtcgcctacgagcgttactttaacgctgaagatgactacacgcgcgaggccgctttacaagagcacatcgcctcggtgcgcaatcatattcgcttactggggcgtaaagactaccagcagcttcccggcctccgctcgctggactatgttctgatgtttatccccgtagaacccgctttcctgctggcgttagataaacagcccgaactgataaccgaggcgctgaaaaataacattatgctggtaagccccacgacgctgctggtggcgttacggacaatcgccaacctgtggcgctatgaacaccagagccgcaatgcgcagcacatcgcagacagagccagtaagctctacgataaaatgcggttgttcgttgatgatatgtcagcgatcggtcagagtctggataaagcgcaggataactaccgccaggcgatgaaaaaacttgcgtcggggcgtggcaacgttttggcgcaggcggaggccttccgggggctaggcgtggaaatcaaacgcgagattaatccggatttagcggaacaggccgttacgcaagatgaagaatatcgtttacgatcgatccctgaagggcggcaggatgaacattatcccaatgatgaacgggtgaagcagcagttaagttaacccatacggagtagtttagtcctggcgcagagtagggcaaattggcccaatctgttacacttcttgaacatttttatcgataagcaggcactgagatggtggaagattcacaagaaacgacgcactttggctttcagaccgtcgctaaagagcagaaagctgacatggtggcccacgtttttcattctgtggcgtcaaagtacgatgtgatgaatgacttaatgtcatttggcattcatcgtttgtggaagcgcttcaccattgattgcagtggcgtgcgtcgtggacaaaccgttctcgatttagcgggtggtacgggcgatcttaccgcgaaattttcacgtatggtcggggaaactggcaaagttatcctggcggatattaatgattccatgctcaaaatggggcgtgagaagctgcgtaatatcggcgtgatcggcaacgtagagtatgtgcaggcgaatgccgaagctctgcctttccctgataatacgtttgattgcattaccatttcgtttggtttgcgcaatgtaacggaaaaagaaaaagcgctgcggtcaatgttccgtgtgttgaaacccggcggacgtttactggtgcttgaattttccaagcctatcattgagccgctgagtaaagcgtatgacgcctattctttccatattttaccgcgtattggctcgatggtcgcaaacgatgcggatagctatcggtatctcgcggaatccatccgtatgcatcccgatcaggataccttaaaagccatgatgcaggacgccggatttgagagcgtggattattacaatctgacggcgggcgttgtggcattgcaccgtggttataaattctaggagggtggaatgccttttaaacccttagtgaccgcaggaattgaaggtctcctcaatacgtttctgtatcgttcgccagcgctgaaatcagccagaacgcgcttacagggaaaagtactgtgtgtgaaactaaagggattttcgatgccattagtcctggtattcagtgaacgccaggttgatgtgctgggggcatgggaaggcgaagcggactgtacggtaatcactcaagctagcgttttgccaaaactacgcgatcgtcagcagttggccacgcttattcgcagcggcgaactggaagtgcagggcgatattcaggtcgtgcaaaattttgtggcgctcgccgatctcgccgaattcgatcctgcggagctgttggcgccatacacgggtgatattgcggcggaaagtatcggtaaggtcgtgcgtggcggggctaaattcctgcgccacgggtttcaacgccagcagcgttatgccgctgaagcgatcactgaagagtggcgtatggcgcctggcccgctggaagtcgcatggtttgccgaagaaaccgcggctgttgagcgcgccgtagattctctgaccacacggctggaaaaactggaggccaaatgacgccaggtgaagtacggcgcctatatttcatcatccgcacgtttttaagctacggccttgatgaactcatcccccgaatgcgtcttacactgccactccgattatggcgctattcgctgttctggatgccaaaccggcataaagataaattgctgggtgaacgattaagactggcgttgcaagagctgggaccggtctggatcaaatttggtcagatgctctccacgcgccgtgacctgttcccgccgcaaatcgccgatcagctcgctttgctccaggataaagtcgcgccattcgatggtcggctggcgaaagcccagattgaagaggcgatgggggggctacctgtcgaagcctggtttgacgactttgatatccagcctttagcgtcggcgtcaatcgcccaggtacataccgcgcgattgaaatcaaacggtaaagaagtggttattaaggtcattcgcccggatattttgccggtaattcaggcagacctgaaactgatttatcgccttgctcgctgggtaccacgcctgttgccggatgggcgtcgtctgcgcccgacggaagtggtgcgtgagtatgagaaaacgctgatcgatgagctgaatctgctgcgggaatcggccaacgcgattcagttacgccgcaattttgaaaatagtcccatgctgtatatcccggaggtgtactccgattactgtagccagaacatgatggtgatggagcggatatacggcattcctgtttcggatgtggcggcgctggaaaagaacggcaccaacatgaaactgctggcggaacgcggggttaaagttttcttcacccaggttttccgcgacagctttttccatgcggacatgcatccgggaaatatttttgtcagccatgaacaccctgaaaacccgcaatatatcggcattgactgcggtatcgtcgggtcgctaaacaaagaagataagcgttatctggctgaaaactttatcgcgttttttaatcgcgattaccgaaaggtggcagaactgcatgtcgattcaggctgggttccgccagataccaacgttgaagattttgagtttgccatccgcaccgtctgtgaacctatctttgaaaagccgctcgcggaaatctcgtttggtcatgtgttgttaaaccttttcaatacagcgcgtcgatttaacatggaagtccagccgcaactggtgttgttgcagaaaacattattgtatgttgaaggggttgggcggcaactttatcctcagcttgatttgtggaaaacggcgaagccgtttcttgagtcctggatcaaagatcaggtgggtattccggctctcacgcgggctcttaaagaaaaagcgccgttctgggtcgaaaaaatgccagaaatacctgaactggtgtacgacagtttgcgccagggcaaatatttacagcacagtgttgataagattgcgcgcgagttacaggtaaaccatgtgcgccaaagtcagtctcgttatttattgggaattggcgcaacgctgttactgagcgggtcattcttactcgtcaaccgccctgaatggggattgatgcctggctggctcatggtcggcggcgtagttgtctggctggttggctggcgtaaaactcgttgagattttttatcgctcaacgccggttgtgtcacgcaggtacatattatcactcgaggcaatactcaggccgcaagtcaatgtcgtcccggtcgtatgtaaaagtatgtgaatagggcgggcgaaagcggctaacaaagaggcagcgtgaaggataatgtgtataatgcggccctaataattcatcatctatcacagaggaacatgtatgggtggtatcagtatttggcagttgttgattgttgccgttatcgtcgtactgctgttcggcaccaaaaaactcggttccatcggttccgatcttggcgcgtctatcaaaggctttaaaaaggccatgagcgatgatgatgccaaacaggataaaaccagtcaggacgctgattttaccgctaaatctatcgcggataagcaaggcgaagcgaaaaaggaagacgctaaaagccaagataaagagcaggtataatccgtgtttgatatcggttttagcgaactgctgttagtgttcgttatcggcctcattgtgttggggccgcaacgattgccagtagcggtaaaaacggtagcgggctggattcgcgcgttgcggtcccttgcgacaacggttcagaatgaactgactcaggaactgaaacttcaggagttccaggacagtctgaaaaaagtcgaaaaggcgagcctggaaaatctgactcccgaactgaaagcatctatggatgaactgcgtcaggcggcggagtcgatgaaacgcacctacagcgctaacgatcccgaacaagcgagcgatgaagcgcataccatccataatccggtggtaaaagggaacgaaacgcagcatgagggcgtcacccctgccgccgctgaaacacaggcgagcgcgccggaacaaaagccggagcccgttaaagctaacgtgcctgagtcgacggaaaccgcttccgtagccacgatagacgccgagaagaaatccgctgcgcctgttgtcgaatcttccccctcgtcgagtgataaaccgtaaacatggctgtagaagatactcaaccgcttatcacgcatctgatcgagttgcgtaagcgcctgctaaactgcatcgtcgcagtacttctgatttttctggcgttaatttatttcgccaatgatatttatcatttagtcgccgcaccgctgattaaacagatgccgcaaggggcgacaatgattgcgacggatgtggcgtcgccgttttttacgcctatcaaactcaccttcatggtgtctttgatcttatccgcgcctgtcattttgtaccaggtttgggcctttatcgccccggcgctgtataagcatgagcgtcgtctggtcgtacctctgctggtatccagctcgctgcttttctatattggtatggccttcgcctattttgtcgtattccctttggcctttggtttcctgacgcatacggcgccggaaggggtacaggtttcgacagatatcgccagctatcttagctttgtcatggcgctttttatggcctttggcgtagcctttgaagtgccggtggcgattgtgttgctgtgctggatgggcatcaccacgccagaagatttgcgtaaaaaacggccttatatcctggtcggggcattcattgtgggaatgctgcttacgccgccagatgttttctcgcaaacgttgctggcgataccgatgtactgcctgtttgaaattggcgttttctgctcacgcttttatgtcggtaagcgacggacgcgcgacgaagataacgaggccgaaaccgaaaaggccgagcacactgaagactaaacacaaccgcccgccagggcggttgtcatatgggggcaagcatgtttgatattggcgttaatttaaccagtagccagtttgcaaaagatcgtgatgatgtggtcgcccgtgcgtttgcggcgggagtaaaaggtatgctactgaccggaacgaacatccatgaaagtcagcaggcgttaaaactggcgcggcgctacccccattgttggtcgacggctggcgtccatccccatgacagcagtcagtggtcacccgcgtctgaagacgccattattgcgctggcgaaccagccggaagtcgtcgctatcggtgagtgcgggctggatttcaatcgcaatttttccacgccgcaggagcaggagcgtgcctttcaggcgcagctacaaattgccgccgaattgcagataccaatctttatgcactgccgggacgcgcatgagcgatttctggtattgcttgatccctggctggatagtcttcctggtgcaatactgcactgctttaccggttcacgccagcaaatgcaggcctgtgtggatagagggctctatatcggtattaccgggtgggtttgcgacgaacgacgcgggcttgagctacgtgaactcttaccgtttattccagcggaaaagctactgatagaaaccgacgcgccgtatctgttgcctcgcgatcttacgccgaaaccaacgtcacgacgcaacgagcccgcgtatctgcctcacatcctggagcgcatagcgctatggcgtggtgaagatccgcaatggttagcggcgatgacagatgccaacgccagaaccttatttgaggttgtattctgaacgatcgctaaatcttgcgaaaaccggtgttttttacgctctgcttcacttctttattgagtaaattaagcagtaacatcgaacgcgtttcgccatccggttcggtaaaaatcgctttcagcccttcaaatgcgccttccgtgatgatgacgctatcgccgggatagggggtttcaggatcgacaacgccttcgggcttgtagatagaaagctgatgaataacgctggaaggcacgatcgcaggatgcgcgccaaagcgcacaaaatggctgacgccgcgcgtggcgttgattgtagtggtatgtatcacttccggatcaaattcaacgaacagataattaggaaagagcggttcgctgacggaggtacgttttccgcgtaccattttttccagggtgatcatcggtgtcaggcaacttaccgcttgtctttcgaggtgttcctgagcacgctgaagttgcccgcgtttgcagtacagtaaataccaggattgcataatgactcttatccgcttgttcggggcgcaagcatagcaaaagccatgcgcgaagttaattatacacttcatcctttaagccgtatctggattagcgttggttgccagagttcacgctaatttaacaaaaatacagcatcccgatgatgaacgccgtataatgatgcgcttaccaagaggctacaatggacgccatgaaatatcacgatttacgcgacttcctgacgctacttgagcagcagggggaactaaaacgcatcacgctacctgtggatcctcatctggaaatcacggaaatcgctgaccgcacgctgcgtgccggtggaccggcgttgctgtttgaaaatcctaaaggttacgccatgccggtgctgtgcaacctttttggcacgccaaaacgcgtggcgatgggcatggggcaggatgatgtttccgccttacgggaagtgggtaaattattagcgtttcttaaagaacctgagccgccgaaaggctttcgcgatctgtttgacaagctgccgcagtttaagcaagtgctgaatatgccgacgaaacggttacgcggcgcgccttgccagcagaaaatcgcgtctggcgatgatgtcgatttaacgcgtcttcctgtcatgacctgttggccggacgacgccgcgccgctgattacctggggactgacggtaacgcgtggtccgcacaaagagcggcaaaacctgggcatttatcgtcagcagttgataggtaaaaataagctgattatgcgctggctgtctcaccgcggcggcgcgctggattttcaggagtggttagccgcgcgtccgggtgaacgtttcccggtctccgtcgcattgggcgccgatccggcgacgatacttggcgccgtgactcctgttcccgatactctgtcggagtatgcctttgcgggcctgctgcgcggcacgaaaactgaagtggttaaatgcctttctaacgatctggaagtgcctgccagcgccgagattatccttgaaggttacattgagccgggagagatggcgccggaaggaccgtatggcgatcatacgggctattataatgaagtggatagctttccggtctttaccgtcacgcatattacacagcgtgaggatgccatctatcactccacctataccgggcgtccgcccgatgagcctgcggtattaggggtggcgctcaatgaagtcttcgtgcctattctgcaaaaacagtttccggaaatcgtcgacttttatctgccgccggaagggtgttcttaccgcctggcggtagtgacgatgaaaaagcagtacgctggtcatgcgaaacgcgtcatgatgggcgtctggtcgtttttgcgccagtttatgtatacgaaatttgttatcgtttgcgatgatgacgttaacgcacgcgactggaatgatgtgatctgggcgattaccacccgtatggaccctgcacgggatacggtgctggttgaaaatacgccgattgattacctggattttgcctcgccggtctccgggctgggttcaaaaatggggctggatgccacaaacaaatggccgggcgaaacccaacgcgagtggggtcgtcctattgttaaagatcctgaagttaccgcgcgtattgatgcgatttgggatgagctggctatctttaaataactgaaagcggacatcgacatttcaggctgcggcgactcagcttgaaaaatgtcggtattgacccgacacccgacagagggagcgcatgacaaccttaagctgtaaagtgacctcggtagaagctatcaccgataccgtatatcgggttcgtttagtgccggacgcggcgttttcattccgcgctggtcagtatttgatggtcgtaatggacgagcgtgacaaacgcccgttttcgatggcttcaacgccggacgagaaggggtttattgaattacacattggcgcctccgagctcaatctgtatgcgatggcggtcatggatcggattctgaaagaccgggaaatcgtcgtcgatattccgcatggcgacgcctggctacgtgacgatgaagagcgtccgttgattctgatcgcgggcggtacgggcttttcttatgtgcgctccatcctgttgacggcgttagcgcgcaacccggcccgcgatgttaccatttactggggcggccgcgaagaaaagcacctctatgatctctctgagctggaagcactctctgttaaccatccgaatttgcgtattgaacctgttgtcgagcagccggaagaaggctggcgtggacgtacaggaacggtacttacggcggtattgcaggattatggtacgctggcggggcacgatatttatattgccggacgttttgagatggcgaaaatcgcccgcgatctgttctgtcatgagcgtaacgcgcgggaagatcgtctgtttggcgatgcgttcgcatttatttaactattttatgggacgcagtagcgtccctttttacgttagcctacctaaaagtcctcttaaatattaattaatcgtcaactataaaaccttatgatattgaatatctacaggctttgtattgcgtgtaataaattaagtaatattatgtcctgaggctatcaataaaaatagttaattatatatgcttcatttatttttataaaagaaacataaaatggaaagttagttatttatttataagatggagagtgttatgaaatttaaatatgctttaacttctctcgcattatctgttgcaattttgtcatcagtaccttctactgctttcgccatcggcggcgccagcggcgctaaagtggactatcaggtccagggaaaaattggcgaagttgttatgaacccctatgatatcgcgccgctaaccgccgttattcgtaatggcggttaccagttacgtgacgtgcatgtacggattgtacccaaagaaaatggccaggagatcgcgtataaagttaataataaataccttttaacgtatggcggtattcccgtctttggtctttacccggattatgtcaataccgttgaagttgaatatacaagtatccagggtagtaaaaccgaaaatgtaaaagaaagctataaaatgtatgcaccgcctgcctatattgaatcagcgggtacaaaagaagaacaatcagcactctttactatcgatgttaaaaaggtttccccagaatttaaagatcgcttgtatcttttgaataatacgaaagataagtctgggaatggaacgcgtactgtctggaacaaccctactgggggtgcattagaatggaacttcactacagctaacgctattatcgacacctccggtgatattcgttggtttatgaatccaagttcaatttatgatttaaagtcaatttatcgtgctggcgttatgatgggctttaaacaaaaccaggatggcgcactatcgtggggctacggtcagcgttatgtgaaatacgatatcatggggcgtgaaatctttaaccgccgcctgccggataattataacgatttttcacactcaatggataacgcggccaacggtcactacttcctgcgtgtagccagctctaactataaacgccctgatgggaaaaatgttcgtaccgtgcgtgatgtgattgccgaagttgatcagaacggcgtggtagtggatgaatggcgtctgtttgatatcctcgatccttatcgtgatgtgataatgaaaaccctcgatcagggcgctgtgtgcctgaatatcgacgccagccagtccggccatacgttgagcgaagaagatctggcggcgctggactcctccgacaaattcggggatatcgtgggtagtggggctggccgcaactgggcgcatgtcaacagcgtcgactatgacagtgaagatgattccatcatcatcagctcccgccaccagagtgcgattatcaaaatcggccgcgataagaaagtgaagtggatactgggtacgcctgctggctggaaagcgccatttaatgccgcaattctgacgcctgtggatagcaaaggccaaaaaatcgcctgccaggacagtggctgcgagggtgacttcgactggacatggacgcaacatacggcctttaaaattgatagtaagagtaaaggcgatatcttatacctttccgctttcgacaatggcgatggccgcggcttagaacagcctgctatgcagagtatgaaatacagccgctccgtgatttacaaaatcgaccagaaaaacaagacagtccaacagatctggcaatacggtaaagagcgcgggaacgagtggtttagcccggtaacctctatcaccgagtaccagactgacaagaattctgtgttcgtgtattccgcaacagcaggtggtgcgtttgatttatcggtaggcgcatttaccagcttgcctaatccgtatctggaagagttcaaatggggagaaaaagagcctgcggttgaaatgcaaatacatggtgcgcgtggatatcaggctatgccatttagcctgaccaaagcgcttactgagtagagcaggccatacggtgaaaaaacccgcccctgacgggcgggaaaaacggcaactaaactgtttcccgtcataattcgcgcagcctctttgttggctgcctttgctcaccccgggcacatagttatctatgtgcccggggattcgctcagttgccgctgcgctgcaatgcgagttatttaggggatattatctttgattaaacccgctcaaacaccgtggcgatgccctgacccagaccaatacacatcgtcgccagaccaaactgcgcgtctttgcgctccatcaggttgataagcgtggtgctgatacgtgctccggagcagccgagcggatgaccaagcgcgatcgcaccgccgttgaggttgatcttctcgtctatctgctccatcaatcccagatccttaatgcatggcaggatctgtgcggcaaacgcttcgttcatctcaaacacatcgatatcgctggctgacagtcccgcttttttcaacgccagttttgacgccggaaccggcccgtaacccataattgacggatcacaacccaccactgccattgagcgaatacgggcgcgaggtttcagacccagctcacgggcacgactttcgctcattaccagcatggcggctgcgccatcggaaagcgcggatgaggtgcccgccgtgaccgtgccactaaccggatcaaatgccggacgcagcgttgatagcgcttcgaccgtggtttccgggcggatcacttcatcgtagttaaactgcttcaacacgccgtctgcatcatgaccgccagtcgggataatctccgttttgaatgcgccagactgggtggcggcccaggcgcgagcgtgagaacgcgcggcgaactggtcctgcatttcccggctaatgccgtgcaggcgggagagcatttccgccgttagccccatcatccctgccgctttggcgacgttgcgactcagacccgggtgaaaatccacgccgtggctcatcggcacgtgccccatatgctccacgccgccaaccagacaaacctgcgcatcgccggtcatgatcattcgcgctgcatcgtgtaacgcctgcatcgaggaaccacacagacggttgacggtgaccgccggtaccgaatggggaatttctgccagcagcgcggcgttacgggcaatgttgaagccttgctccagcgtttgttgtacgcagccccagtaaatatcatcgagggtcgccgctgtaagcgacggattacgcgccagcaggctacgcattaagtgggcggagagatcttctgctcgcacgttgcgaaacgcgccgcccttcgaacggcccatcggggtgcgaatagcatcgacaatgacaacctgttccattgtgactccttaagccgttttcagagaaccaaccggacgggctggttcaaccgggggataatacggttcgttatggcgcgctttattacgcagcccttccggcacctcatacagcgggccgaggtgttgatactgctgcgccatatcaagatatttcgcgctgccctgtgtatccagccagcggaatgcgccgccgtggaacggagggaagcccaggccgtagaccagcgccatatcggcttccgccgggcttgcgataatgccttcttccagacagcgaaccacttcgttaatcatcgggatcatcatacgggcgattatctcgtcgtcgctgaagtcgcgtttcggctggctgacgcttgccagcaggtcatccaccgcggcatcttcttctttcttcggcttacccttgctgtcttctttatagcgccagaagcccagaccgtttttttgcccaaaacggctggcgtcaaacaatgcgtcgatcgcgtcgcggtaatctttctgcatacgctgtgggaagcctgccgccattactgcctgcgcgtggtgggcggtatcaatacccaccacgtcgagcagataggccgggcccatcggccagccgaactgtttttccatcactttatcgactttgcggaaatccgcgccgtcgcgcagcagttgactgaaaccggcgaaataggggaacagcacgcggttaacaaagaagccggggcagtcgttgactacaatcggtgtcttgcccattttgctggcccaggcgacgactttggcaatggtttcgtctgaactcttctcgccgcgaatgatttcaaccagcggcatccggtgtaccgggttgaagaagtgcattccgcaaaagttttccggacgttccagggcgcttgccagttcgccaattgggatggtggaggtatttgaggccagcacggtttccgggcgcactttctgctcggtttccgccagtaccgcttttttgactttcggattttcgactaccgcttcgacaacaacatctacgcgatcgaaaccggcataatcgagagtcgggtggatggtcgaaatgacgcccgccagcttcagaccgtcgatcttgccgcgctccagctgtttgttcagcagcttggccgcttcggtcatgccgaggttcaacgatttatcgttgatatctttcatgatgaccggtacgcctttccaggccgactggtaagcgataccgccgcccataatgcccgcgcccagtacggctgcctgtttcggcgtctcaatatctttggtcagctttttggctttaccttttacatattgatcgttgaggaagataccgaccagcgcacgagcctcattggtatgcgccagcggaacaaagcttttattttccagattcagcgcttcttcacgaccaaaacgcgcggcggcttcaatggttttcactgcggtcatcggcgccggataatgtttacccgccgtttgtgcgaccatgcctttagcgatggtaaagctcatcgctgcttcaatcttactgagtttcaacggttccagtttcggctggcgtttagctctccagtcgagatcgccggtaatggcctggcgtaacaccgctatcgcgccttcaattagcttctcttgtttgaccacgccgtccacaaggccgattttcagcgcgtgctcagcaccgacatctttacctgccgcgataatctccagcgcgctgtctgcgcccagcatacgcggcagacgaacggagccgccgaaacccggcatgatgcccagtttagtttccggcagaccgatacggaggtctggcgtcgccagacggtaatcggtggccagcacgcattcgcacccgccgcccagcgcatagccgtttacggcggcaagggtcggtacgggtaaatcttccagacggttaaagacgctattagcgaaatgcagccattggcttaactgctcttcggggacgaggaacagtgaaagaaattcggtgatgtccgcgccgacaataaaggccgctttattagagcgcagcagcagcccttttaaatcgtgttgcttttccagcacctcaagcgcctggccgaggctggcgacggttgcggtgtcgagtttattgaccgagcctggagcatcgaacaccagttcggcgatgccatcttccagccagtcgaggtacagggtgtcgcctttataaagcatgtcagtctcctgaatccacaaagtgatctggtcgtaccagatgaagcgaagtgtgtattttgtgttaaaaaaatgcaaataaatgattaaagaaatgccgatgtgatcacgctcggcagagatcacgctctcgtggggcgatgtgctaagatgcgggaacttgaggtcaaaaaaacagaagggtaaaaaatggaatcactggccgcgctctataaaaatcatattgttaccttacaagaacggacgcgcgatgttctggcgcgctttaagctggatgcgttacttattcattctggcgagcttttcaacgtctttctcgacgatcacccttatccgtttaaggtcaatccacagtttaaagcgtgggtgccggtaactcaggttccaaattgctggctgttggtcgatggcgtcaacaaacccaaattgtggttttatctgccggtcgattactggcataacgttgaaccgctgccaacgtccttctggacagaagaagtcgaggtcgtcgccttaccgaaagcggatggcatcggcagccaactgcctgccgcgcgtggcaatatcggctatatcggcccggttcctgagcgcgcgctacaattggatatcgccgccagcaacatcaacccgaaaggtgttatcgactatctgcattactaccgcgcctataaaacggattatgaactggcctgtatgcgcgaagcgcagaaaatggcggtgagcggtcatcgggcggcggaagaggccttccgttccggcatgagcgagttcgacatcaacctggcgtacctgaccgccacgggacatcgcgataccgatgttccatacagcaacattgtggcgctgaacgaacatgccgccgtgctgcattacacgaaactggatcatcaggcaccgtctgaaatgcgcagtttcctgctggatgcgggcgcggaatacaacggctacgcggcggatctgacgcggacctggtcggcgaaaagcgataacgactacgcccacctggtgaaagatgttaacgacgaacagttggcgctgatcgctaccatgaaggcgggcgtcagctatgtggattatcatattcaattccatcagcgcatcgcgaagctgctgcgtaaacatcaaatcattaccgacatgagtgaagaggcgatggtggaaaatgatctcaccgggccgtttatgccgcacggtattggtcatccgttgggtctgcaggtacacgatgtggccgggtttatgcaggatgattccggtacgcatctcgccgcgccgtccaaatacccgtatctgcgctgcacgcgtgtgttacagccgcgaatggtgttgaccatcgaaccggggatttacttcatcgaatcgctgttagcgccatggcgcgaaggcccgttcagcaagcacttcaactggcagaaaattgaagcgctcaagcctttcggcggtattcgcattgaagataacgtggtcatccacgaaaacggcgtggaaaacatgacgcgggatttaaaactggcgtaatggacagttggttaatccctgcagcgccggtcaccgttgttgaagagatcaaaaaaagccgctttattacgctattggcgcataccgatggcgtagacgcggcgaaagcgtttgttgagtcagtcagagctgagcatcctgatgcgcgccaccattgtgtggcgtgggtggcgggtgcgccggacgactcacagcaactgggcttttcagacgacggcgaaccggcgggaacggcaggcaagccgatgcttgcgcaattgatgggcagcggcgtcggagaaattactgccgtcgtcgtgcgctactatagtggtattctgctgggtacgggcgggctggtaaaagcctatggcggcggtgtgaatcaggcattacgtcagcttgccacacaacgcaagacgccattaaccgaatatactttgcagtgtgagtacggtcagttggccggaatcgaagcattattaggacagtttgccgggaagatcgtttccagcgattatcaggcgtctgttcggctcagggtggcgcttccttttgctcatgtgaatgcattttccacaaaactggcggattttagccgtggttcattgcaattgttagcgattgaagaataatccccacctcatttttaagaataaaggaagcggcagagatgcattttcgcgccattacccgaatcgttggactactggttatcttattttcggggacaatgattctcccgggactggtagcgctaatatatcgtgatggcgcaggaagagcgttcacgcagaccttttttgtcgcgctggcgatcggttccatactgtggtggccgaaccgtagggaaaagggcgagctgaaatcccgcgaaggatttcttatcgtggtgctgttctggaccgtgctgggcagcgtgggtgcgctgccgtttattttctcggaaagcccaaacctcaccattaccgatgctttttttgaatcgttctccgggttaaccaccacgggcgccactactctggtggggctggattcattaccgcacgccattctcttttatcgtcagatgctgcaatggtttggcggtatggggatcattgtgctggcggtggcgattctccctatcctcggcgtcggggggatgcagctctatcgggcggaaatgccggggccgctcaaagataacaaaatgcgcccgcgtattgccgagacggcgaaaacgctgtggcttatctatgtcttgctaacggtagcctgcgcgctggcgctatggtttgcagggatgcccgcgtttgacgctatcggacacagcttctccactatcgctatcggcggcttctcaacgcatgacgccagcgtaggctattttgatagtcccactattaataccatcatcgctattttcctgctgatctccggttgtaactatggcctgcatttctctttattaagcgggcgtagcctgaaagtatactggcgcgatccggaattccgcatgttcatcggcgtacagttgacgctggtggtgatctgcacgctggtactgtggttccataatatctacgactcggcgctgacaacgctaaatcaggcgttcttccaggtcgtgtcgatggcgacaacggcagggtttaccacggacagcattgcgcgctggccgctgtttttgcccgtcttgctgctatgttccgcgtttattggcggttgcgccgggtcaacgggcggggggttaaaggtcatccgtattctgttgttgtttaaacaggggaaccgcgaactcaaacgtctggtgcatccgaatgccgtttacagtattaagctggggaaccgggcactgccagaacgtattctggaagccgtctggggattcttttctgcctacgcgctggtatttatcgtcagtatgctggccattatcgctacaggcgtagatgatttctcggctttcgcctcggtagtggctacgcttaataacctgggaccggggctgggggtggttgctgataacttcgccagtatgaatccggttgcgaaatggatactaatcgccaacatgctatttggtcgtttggaagtattcactttgctggtactttttaccccgactttctggcgtgaataatggagtaacacgtgaaaacattgattcttttctctacccgggacggacaaacgcgcgaaattgcctcttatctggcttctgaactcaaagatatggggatctgggccgatgtcgttaatctgcatcgcgcagaagagcctgactgggatagctatgatcgcgtagtgattggcgcgtctattcgttatggtcattaccacagcgcctttcaggagtttgttaagaaatatgccacgcggttgaacggaatgccgagcgccttttattccgttaacctggtggcgcgtaaagctgaaaaacggacgccgcagactaacagctacgcgcggaagtttttaatgagctctccgtggcgacctgactactgtgccgtcattgcaggcgcgcttcgctatccccgttatcgctggtatgaccgtctgatgatcaagcttattatgaagatgtcgggcggcgaaacggataccagtaaagaagtggtgtacaccgactgggagcaggttgcgcactttgcccgtgaaatagcccatttaaccaacaaatcgtcggcaaaataaacgcaaagaataaaaagtgcgcactcagaaaattattttaaatttcctcttgtcaggcaaaaataactccctataatgcgccaccactgacacggaacaacggcacacaggccgccgggtcagcggggttcggaccagaacctcacggagaaaagcgaaaataaacgcttgactctgaagcgggaaagcgtaatatgcacaccccgcgccgctgagaaaaagcgaagcggcactgctctttaacaatttatcagacaatctgtgtgggcactcgaagatacggattcttaacgtcgcaagacgaaaaatgaataccaagtctcaagagtgaacacgtaattcattacgaagtttaattcattgagcatcaaacttttaaattgaagagtttgatcatggctcagattgaacgctggcggcaggcctaacacatgcaagtcgaacggtaacaggaagcagcttgctgcttcgctgacgagtggcggacgggtgagtaatgtctgggaaactgcctgatggagggggataactactggaaacggtggctaataccgcataacgtcgcaagaccaaagagggggaccttcgggcctcttgccatcagatgtgcccagatgggattagcttgttggtgaggtaacggctcaccaaggcgacgatccctagctggtctgagaggatgaccagccacactggaactgagacacggtccagactcctacgggaggcagcagtggggaatattgcacaatgagcgcaagcctgatgcagccatgccgcgtgtatgaagaaggccttcgggttgtaaagtactttcagcggggaggaaggtgttgtggttaataaccgcagcaattgacgttacccgcagaagaagcaccggctaactccgtgccagcagccgcggtaatacggagggtgcaagcgttaatcggaattactgggcgtaaagcgcacgcaggcggtctgtcaagtcggatgtgaaatccccgggctcaacctgggaactgcattcgaaactggcaggcttgagtcttgtagaggggggtagaattccaggtgtagcggtgaaatgcgtagagatctggaggaataccggtggcgaaggcggccccctggacaaagactgacgctcaggtgcgaaagcgtggggagcaaacaggattagataccctggtagtccacgccgtaaacgatgtctacttggaggttgtgcccttgaggcgtggcttccggagctaacgcgttaagtagaccgcctggggagtacggccgcaaggttaaaactcaaatgaattgacgggggcccgcacaagcggtggagcatgtggtttaattcgatgcaacgcgaagaaccttacctggtcttgacatccacagaagaatccagagatggatttgtgccttcgggaactgtgagacaggtgctgcatggctgtcgtcagctcgtgttgtgaaatgttgggttaagtcccgcaacgagcgcaacccttatcctttgttgccagcgattaggtcgggaactcaaaggagactgccagtgataaactggaggaaggtggggatgacgtcaagtcatcatggcccttacgaccagggctacacacgtgctacaatggcgcatacaaagagaagcgacctcgcgagagcaagcggacctcataaagtgcgtcgtagtccggattggagtctgcaactcgactccatgaagtcggaatcgctagtaatcgtggatcagaatgccacggtgaatacgttcccgggccttgtacacaccgcccgtcacaccatgggagtgggttgcaaaagaagtaggtagcttaaccttcgggagggcgcttaccactttgtgattcatgactggggtgaagtcgtaacaaggtaaccgtaggggaacctgcggttggatcacctccttaccttaaagaaacggtctttgaagtgctcacacagattgtctgatgaaaaacgagcagtaaaacctctacaggcttgtagctcaggtggttagagcgcacccctgataagggtgaggtcggtggttcaagtccactcaggcctaccaaattttccctgaatactgcgttgtgaaataactcacatactgatgtatgcttcgttattccacgccttgtctcaggaaaaattatcggtaaagaggttctgactacacgatggggctatagctcagctgggagagcgcctgctttgcacgcaggaggtctgcggttcgatcccgcatagctccaccatctcgtgagtgtttacgaaaaaatacttcagagtgtacctgaaagggttcactgcgaagttttgctctttaaaaatctggatcaagctgaaaattgaaacacagaacaacgaaagttgttcgtgagtctctcaaattttcgcgacacgagaatgttttacgaaacatcttcgggttgtgaggttaagcgactaagcgtacacggtggatgccctggcagtcagaggcgatgaaggacgtgctaatctgcgataagcgccggtaaggtgatatgaaccgttataaccggcgatttccgaatggggaaacccagtgtgattcgtcacactatcattaactgaatccataggttaatgaggcgaaccgggggaactgaaacatctaagtaccccgaggaaaagaaatcaaccgagattcccccagtagcggcgagcgaacggggaggagcccagagcctgaatcagcatgtgtgttagtggaagcgtctggaaaggcgcgcgatacagggtgacagccccgtacacaaaagcgcatgtgctgtgagctcgatgagtagggcgggacacgtggtatcctgtctgaatatggggggaccatcctccaaggctaaatactcctgactgaccgatagtgaaccagtaccgtgagggaaaggcgaaaagaaccccggcgaggggagtgaaaaagaacctgaaaccgtgtacgtacaagcagtgggagcacccttcggggtgtgactgcgtaccttttgtataatgggtcagcgacttatattctgtagcaaggttaaccgtataggggagccggagggaaaccgagtcttaattgggcgttaagttgcagggtatagacccgaaacccggtgatctagccatgggcaggttgaaggttgggtaacactaactggaggaccgaaccgactaatgttgaaaaattagcggatgacctgtggctgggggtgaaaggccaatcaaaccgggagatagctggttctccccgaaagctatttaggtagcgcctcgtgaattcatctccgggggtagagcactgtttcggctagggggccatcccggcttaccaacccgatgcaaactgcgaataccggagaatgttatcacgggagacacacggcgggtgctaacgtccgtcgtgaagagggaaacaacccagaccgccagctaaggtcccaaagtcatggttaagtgggaaacgatgtgggaaggcccagacagccaggatgttggcttagaagcagccatcatttaaagaaagcgtaatagctcactggtcgagtcggcctgcgcggaagatgtaacggggctaaaccatgcaccgaagctgcggcagcgaacgtatcacccaagacaactttacggagttgacgattgacggagcgaagcgacgtcaaagcgttcattaaagtcgagttggcttagggatacgttcgttgggtaggggagcgttctgtaagcctgtgaaggtgtgtcgtgaggcatgctggaggtatcagaagtgcgaatgctgacataagtaacgataaagcgggtgaaaagcccgctcgccggaagaccaagggttcctgtccaacgttaatcggggcagggtgagtcgacccctaaggcgaggccgaaaggcgtagtcgatgggaaacgggttaatattcccgtacttggtgttactgcgaaggggggacggagaaggctatgttggccgggcgacggttgtcccggtttaagcgtgtaggtgtgtgttccaggtaaatccggttcactttaacactgaggcgtgacgacgaggcactacggtgctgaagcaacaaatgccctgcttccaggaaaagcctctaagcatcaggtaacacgaaatcgtaccccaaaccgacacaggtggtcaggtagagaataccaaggcgcttgagagaactcgggtgaaggaactaggcaaaatggtgccgtaacttcgggagaaggcacgctgacacgtaggtgaagtgatttactcatggagctgaagtcagtcgaagataccagctggctgcaactgtttattaaaaacacagcactgtgcaaacacgaaagtggacgtatacggtgtgacgcctgcccggtgccggaaggttaattgatggggtcagcgcaagcgaagctcctgatcgaagccccggtaaacggcggccgtaactataacggtcctaaggtagcgaaattccttgtcgggtaagttccgacctgcacgaatggcgtaatgatggccaggctgtctccacccgagactcagtgaaattgaactcgctgtgaagatgcagtgtacccgcggcaagacggaaagaccccgtgaacctttactatagcttgacactgaacattgagccttgatgtgtaggataggtgggaggctttgaagtgtggacgccagtctgcatggagccgaccttgaaataccaccctttaatgtttgatgttctaacgtggacccgtaatccgggttgcggacagtgtctggtgggtagtttgactggggcggtctcctcctaaagagtaacggaggagcacgaaggttggctaatcctggtcggacatcaggaggttagtgcaatggcataagccagcttgactgcgagcgtgacggcgcgagcaggtgcgaaagcaggtcatagtgatccggtggttctgaatggaagggccatcgctcaacggataaaaggtactccggggataacaggctgataccgcccaagagttcatatcgacggcggtgtttggcacctcgatgtcggctcatcacatcctggggctgaagtaggtcccaagggtatggctgttcgccatttaaagtggtacgcgagctgggtttagaacgtcgtgagacagttcggtccctatctgccgtgggcgctggagaactgaggggggctgctcctagtacgagaggaccggagtggacgcatcactggtgttcgggttgtcatgccaatggcactgcccggtagctaaatgcggaagagataagtgctgaaagcatctaagcacgaaacttgccccgagatgagttctccctgagacttagagtctcctgaaggaacgttgaagacgacgacgttgataggccgggtgtgtaagcgcagcgatgcgttgagctaaccggtactaatgaaccgtgaggcttaaccttacaacgccgaagatgttttggcggttgagagacgattttcagcactgattcagattacatcagaacgtaaaaacggtctgataacagaatttgcctggcggcactagcgcggtggtcccacctgaccccatgccgaactcagaagtgaaacgccgtagcgccgatggtagtgtggggtctccccatgcgagagtagggaactgccaggcatcaaataaaacgaagggccctgtcggaagacagggccttttgttttatctgtggtctgtcggtgagcactcgttgcgcagcaacggcccggagggtggcgggcaggacgcccgccataaactgccaggcattagtttagtgaagaagcccatcctgacggacgggcttttttgcgtgtgcggtaactgtaaaaccgtaggcctgataagcgcagcgccatcaggcaaccggcactgccggatggcggctccgccttatccggcctacaaggaacgtgctttctctaaccaccgcaaaatgaaggcagaaatctgcgatacatcattaagatccaaaacgggtaccgctacggcaagtggaatatcactggcaaccgcaataacatgctcatcaagaattaattcttcctcgctgtgcccacatccctgacgaaaaagtaagatcttcgcaactgcctcgtgtttaaacccttctaccagcaccatatctagctttgatgcatccatccggctcaccagccatgccagatccaactcttcttgccccggcgtttcagtcattaacgcccagcgctgctgactggcaaccagcgtctgtgccgccccggctttacgtaattcgtagctatctttacccggtttatcaacatccatatcatgatgggtatgcttaatcagccctggccgaataccgtgcgcacaaagtgctgggatcagttttttcagcagtgttgtttttcccgtgccgctccacgcggcaatggcgagtagcggtatcatggtctcttttgccattgcgcgagttcctccggcgtgttgacgttcacaaatgcctccttacaatcgctgaaatcaacggcgtgtccgcctacctggcgcataaaaatcattacccgccgctcgcctgcttgcaaataagctgtcaactggggctcaacggcacgattaatcaacgcgatcgttggatgatcgcgctctccatcatgaacccaaaccacgggtgcaccatgacgctgcgctgctaaacgatcgaccaggttgtgggggatacagggattgtcacagggacaaaacagaaaccagtcgcctgctacctgctgaaaaacggaaagcatacccgccagcggaccgggaaagtcagcaattgaatccggaatgactttcaggccgctggcctggtagatatccagatggcgattagcactaatgacgaccgtagcaagttgtggcgcgagcgcgtcggcaacgtgtcgccagagcggtttcccgcccagttcaagcagacctttatccgcacctcccatccgcctggctttaccgcctgccagcaccacgccggttattacttcatccagattcaccgatatcgcctcttttattgtgggattgaccctgctaccgtgtctgtatcaagaataaggagcacagctatgaaatgtaaacgcctgaatgaagtcattgaactcctccagccagcctggcagaaagagcctgatcttaatctgacgcaatttttgcagaaactggcgaaagagtcaggttttgacggcaaactggaagatttaactgatgatatcctgatctaccatctgaaaatgcgcgattccgccaaagacgccgccattccagggattcaaaaagactatgaagaggactttaaaacggcgcttttacgcgcccgcggcgttattaaagagtaaaaccttgtaagcggcgccaccgaaatcgccacgaaatgatatcctgaatcattcgtagtattttccggatgatgggatgaacgacaacgcttttactttccagacgctacacccggaaaccatcatggatgcgctgtttgaacaggggatcatggtggattccgggctaactccactaaacagttatgaaaaccgcgtctatcagtttcaggatgaagaccgtcgacgttttgtcgttaagttttatcgtcctgaacgctggtctgttgatcaaattcgggaagaacatcaattcgcgcttgaactggtgaaggatgaggttccggttgctgctccgctcgcgtttaatggccagacgctgttagcgcatcagggctatcattatgccattttccccagcgtaggcggtcgtcagtttgaagcagacaatatcgatcagatggaggcggtagggcgttatcttggccgattgcatcagacggggcgaaaacgtcctttcactttccggcctgacattgggcttgcggagtatctttttgaacctcgccaggtattcgaagatgccgcactgattccctccgggcaaaaagcggctttcctgaaagccactgatactctactgtctgcagttaccgaatgctggcgcaccgatttcgccacgctgcgattgcacggcgattgtcatgccggcaacattctatggcgtgatggaccgctgtttgtcgatttagatgatgcccgtaacggtccggcgatacaggatttatggatgctgctgaacggcgacaaagccgaacagcgaatgcagcttgaaaccattattgaagcttatgaagaagttagtgagttcgatacggctgaaattggtctcattgaacctttacgcgccatgcgtttagtttattatcttgcctggttgattcgtcgttggggcgatcctgcgtttccaaaaaactttccctggttaacaggggaagattactggcagcgacagacaacgacttttattgagcagactaaaattttgcacgaaccccctttacaattaacgccaatgtattaatcggagagagttgatcatgaaaaagatttggctggcgctggctggtatggttttagcttttagcgcctcggcagcacagatcagcgacggtaaacagtatatcacgctggataaaccggtcgctggcgaaccccaggtactggagtttttctccttctactgcccacattgttatcagtttgaagaagtgcttcatgtgtctgacaatgtgaagaaaaagctgccggaaggcaccaaaatgaccaagtaccacgttgagttcctggggccgttgggcaaggagctcacccaggcatgggcggtggcgatggcgttgggtgtagaagataaagtcacggtcccgctgtttgaagccgtacagaaaacccagacagtacaatctgccgcggatatccgtaaagtgttcgttgatgcgggcgtcaagggcgaagattacgatgcggcatggaacagcttcgtggtgaaatcactggttgcgcaacaggagaaagccgcggctgacctgcaactgcagggcgttccggcgatgttcgtcaatggcaaataccagattaacccacaaggcatggatacgagcagcatggatgtttttgttcagcagtatgctgatactgtgaaatatttggttgataaaaaataaaaagaacgccggtcactgaccggcgtttttataagatgttttaatctcttctatctgtatatctttcttatcccacagcgtattaagccaacgttgaaaacggcgtttgaatgttttgtcgttcacgtaatcgccgtgcagttcttcatttatgggttccagttgcacccgaacaacaatacgcgtcagcctaccgcttagcatatcgtagaaagggtgacgatcgttgtttgggtaacacaacgtaatattaagcagcttatcgaactgtgagcctaaaacattaatcgccattgcaataccggctgcttttggcggcaacaaatgttgataaggtgaatgcgtttgctgacgtttctcatgcgtaaatcgcgagccttcaacaaagttaacgatagtggtgggataccgacgaaacttttcgcaagagcgacgagttgtttcaacatctttgccgcgtcgatcggggtgtcggagcaggtagctacgggagtagcgcttcataaacggcatatctaatgcccagcacgccaggccgatgaacggcacccaggccaattgctgtttaagaaagtacttattcattgggatatgcttgcggaacagaacgcaaagcacaacgatatcggcccagctgcgatgattacaaatcagtaaataccaatttttcttgctcagcccttctaacccttctacatcccattgcaagtgcggattaaggcgtaacagcgctgcaagaccagcacaccagcaatacatcatgaaattgcagaaaatggagaccttgcgccagataccgggaacaggcaaaagaagctttaccataccggcaatgatgatcggtactgagcaaacaatagtgaccaggatggtcaatacgatactcaatgggagcgtgatagccgcgagtattctcgtcataataaattattcaaaagttagccataaacggtgcgcgaaaagggcgcaaggggctgattctatcagaaaacgatgctaatgatggcgctgagtgaaatagaaacactcgtaacaactatccacattatgataacggcatgaatcagataatcagaaaaacgtgatgttaacaactcattgaaaataatgggtaattattaagacgagaaggctatcgcgctgattttaaagtaatggtaagaatttacacacaaagttatccacaggttattttgcgagcgatcctgaagatcgacaaaacttttccgcaaatgcggcgaaaaactcaagttttcctcctgtatgtggcatcctttaaccataatctgttaaacaggcacggacattatggttcagatcccagaaaacccacttattctcgtagatggctcatcctatctctatcgcgcctatcatgcgtttccgccgttaaccaacagcgcgggagaacctacgggcgcaatgtatggtgtcctcaacatgttgcgcagcctgatcatgcagtatcagccgacgcatgctgcggtggtgtttgacgccaaaggaaaaaccttccgtgatgagctctttgaacactacaaatcgcatcgtcctccaatgccggatgatcttcgtgcgcaaatagagccgttacatgccatggttaaagccatggggttacctctgctggcggtctctggcgtagaagcggatgacgttatcggtacactggcgcgagaagcggagaaggtggggcgtccggtattaatcagcaccggcgataaagatatggcacagttggtgacgccgaatattacgctgatcaacaccatgactaacaccatcctcggcccggatgaagtcgttaataagtacggcgtgccgcctgagctgattatcgactttctggcgctgatgggggactcctcggataatattccgggcgtaccaggcgtgggtgagaagacggcgcaagccttgcttcagggattgggcggcctggatacgctgtacgccgagccggaaaaaattgccggtctcactttccgcggcgccaaaacgatggccggtaaattagcgcagaataaagacgtagcgtacctgtcttataaactcgccaccattaaaacggatgttgagctggagctgacctgcgaacagcttgaagtgcagcagccgattgcggatgaactgctgggcctgtttaaaaaatatgagtttaagcgctggacggcggacgttgagtcaggcaagtggctacaggcaaagggcgcgaaaccggcggccaaaccgcaggaaacggtcgttattgatgaatcgcccagcgaaccggcagcggcgctctcttatgaaaattatgtcacgattctggacgacgttacgctggaaagctggattgaaaagctgaaaaaagcgccagtttttgctttcgacacggagaccgacagcctggataatatcgccgccaacctggtgggcctctcgtttgccatcgaacctggcgttgccgcgtatgtacctgtcgcgcatgattatctggacgctccggatcaaatctcccgccagcgtgctctggaactgctgaagccgctgctggaagatgaaaaagtgcgcaaagtggggcaaaacctcaagtacgatcgcggcgtcttgcaaaattacggtattgagctgcgcggtatcgccttcgataccatgcttgagtcttacattctgaacagcgtcgccggacgccatgatatggacagtttgtccgatcgttggctgaagcacaaaactatcacctttgaagacattgccggtaaaggtaaaaaccagctcacctttaaccagatcgcactggaggaagcggggcgctatgcggcagaagatgcggatgtcacgttacagttgcatctcaaaatgtggcctgagctccagcagcacaaaggcccgctgaatgttttcgaaaacatcgaaatgccgttggtgcctgtactgtcacgcgttgagcgcaatggcgtaaaaatcgatcctgccgtcctgcacaaacattcggaagaaatcacgctacgtctggcggaactggaaaagaaagcgcatgacattgcgggcgaggcgttcaacctgtcctcgacgaagcagttgcagaccatcctgtttgaaaagcagggtattaagccgctgaagaaaacgcctggcggcgcgccgtcaacgtcggaagaggtgctggaagagctggcgctggactatccgctgccgaaagtgattctggagtatcgtggtctggcgaagctaaaatccacctataccgataagctgccgctgatgattaacccgaaaaccgggcgcgtccatacgtcctatcatcaggcggtaacggcgacgggacgtttatcgtccaccgatccgaacctgcaaaatattccggtgcgcaatgaagaaggccgccgcattcgtcaggcatttattgcgcctgaggattatctcatcgtgtctgcggactattcacagattgagctgcgtattatggcgcatctttcccgtgataaaggactgctcacggcgttcgccgaagggaaggatattcaccgcgcaacggcggcggaagtctttggcttgccgctggatagcgtgaccggggaacagcgccgaagtgcgaaagccattaactttggcctgatttacgggatgagcgccttcggtctttctcgccagcttaatattccgcgtaaagaggcgcagaagtatatggatctctacttcgaacgctatcctggcgtgctggaatatatggagcgcacccgcgctcaggcaaaagaacaaggctatgtggaaactctggaggggcgccgcctttacctgccggatattaaatccagcaacgcggcgcggcgcgcgggggcggaacgcgcggcgatcaatgctcccatgcaaggaacggctgccgatatcatcaagcgcgccatgattgccgtcgatgcctggctacaggccgagcagccacgcgtgcggatgattatgcaggtacacgatgaattagtgttcgaggtgcataaagacgacttagatgcggtagcaaaacgtatccatcagttgatggaaaactgcacgcgtattgatgtgccgttgctggtggaagtcggtagcggggaaaattgggatcaagcgcactaagcatttaaggaataacgcgcttttttcgtaattaagcaacataagcacgggggttttgtgatgggtattagaattccctatgtaaagaatgaaaaaaaattacgaaaaggtctttctgtgttgctcaaaaaagagtaaagttattcacgtagggtacagaggtaagatgttctatctttcagaccttttacttcacgtaatcggatttggctgaatattttagccgccccagtcagtttatgactggggcgttttttattgtgcgcaagaaaagtttcgctcacaccgtaggccggataagacgcgcagcggcgccatccggcatagcgggtgattattccccgtcctgaatctcttcgaccggtgccagttcactaaaccagctatccagcttctgacgtaacttatccacgccctgctttttcagcgaggaaaacgcttctacctgcacatcgccattaaaagccagcacggcttcacgtaccatattcaactgcgccttgcgcgcgccgctggccagtttgtccgctttggtcagcagaaccagaacctggatattgctctctacagcccactggatcatctgttggtcgaggtctttcaacggatggcggatatccattaaaacgactaagccctgtaggctttgacgtttctccagatattcccccagcgcgcgttgccacttgcgtttcatctcttccgggacttccgcgtagccatagcccggcaggtcgaccaaccgtttgccatctacgacttcaaacaggttaatcaattgggtacggcccggcgttttagaggtgcgcgccaggcttttttggttggtcaacgtgttcagggcgctggatttgcctgcattggaacggccagcaaaagccacttcaattccgcaatcggaaggtaaatggcgaatatcaggcgcactcatcacaaaatgcgtctgttgataattcaggttagtcaaagcggtcgtctccgtcagtcaaagcattgtggcgattatacctgaacgccagcaaaagacggatttttcggcgcatcggtgctgtaagtaaaagccatacgctttgtgagacattgaccattgcacttatgcgacatgacagagtcgttgtcaggctcaaagccagttaatatagttaaatcatgaatttatagaaaggtaattgtctgaaaaaaagggatttgccgtgtcggtatcttgtgagtttaccccaaaagagtaaagtaatgcacatagcgaggacgctaacaggatcaacgactcaggatgagggtcaggagcgccaggaggcgaagacacaggattgtcaggaagacaaacgtccggagacgttagtaaaaggaaatggaaacaacatggaatgttccaggctaagggaaaaacagggcgtgttgatagccaacagggatggtggaacccgttaagggtcgtgagtcaagaaaaaaggcggcagattactctgtcgccttttttctttgcttgctttctgctagattccgcctcaattctatactgaataaaacggcttaaagatctgacatcatgaaaaaaccaacctctgcaccgcgcagtaaagcctttggcaaacagcgtcgtaaaacgcgtgaagagttaaaccaggaggcgcgcgaccgtaaacgcctgaaaaaacatcgcggtcatgcgccgggaagtcgcgcggcgggcggcaattccgcttcgggcggcggcaatcagaatcaacaaaaagatccacgtattggcagtaaaacacctgttccattgggcgtgactgaaaaagtgacccaacagcataaaccgaaaagtgagaaacctatgctttcaccgcaggcggagttggatttactggaaacggatgagcgcctggatgcgctgttagaacgtctggaagcgggcgaaaccctgagtgcggaagatcaagcctgggtagatgccaaactggatcgtattgatgaactgatgcagaagcttggtctgtcttacgatgacgacgaagaagacgacgaagaggacgagaagcaggaagatatgatgcgcctgctaagaggcggcaactaacgggtttacaccgtgggcttgcccgtcctgcttataacccttccggttatatgttatctggtgtggttattcgttaaactacagcgattgtcgcggcgacagaaatggctgcgcagccggcttgccgcccgtcatggcgtgaagccggtacgccgtacccgccagagacgccatcggaaggagtgagcatgtctgaacagcaaatagactgggatctggccctgatccagaaatataactattccgggccacgatatacctcgtacccaaccgcgctggagttttctgaagacttcgaggacgccgcattcttgcaggctgtggcgcgttatcctgaacgtccgctctcgctgtatgtgcatatcccgttttgtcacaagttgtgttatttctgcggctgcaacaagattgtcacccgccaacagcataaagctgaccagtatcttgacgcgcttgagcaggaaattcgtcatcgcgcgccgctgtttgcagaccgtcatgtcagccagcttcactggggcggcggtacgcctacttacctgaataaagcgcaaatcagccgcttaatgacgctgttgcgtgaaaatttccactttaataccgacgcggaaatctcgatcgaagtcgatccccgtgaaattgagctggatgtgctcgatcatttacgtgcggaaggttttaaccgcctgagtatgggcgtgcaggactttaataaagaggtgcagcgcctggttaaccgcgagcaggatgaagaattcatctttgcgctgcttaatcacgcccgcgatatcggctttacctcgaccaatatcgatttgatctacggtctaccgaaacagacgccagaaagcttcgctttcacgctgaagcgtgtgacggaactgaaccccgatcgtttgagcgtctttaactatgcgcatctgccaacgctttttgccgcccagcgtaaaattaaagatgctgatttacccagcgcgcagcagaaactggatattttgcaggagacgatcgtatcgcttacccaggctggttatcagtttatcgggatggaccattttgcccgtccggacgacgaactggccgtcgcgcagcgcgaaggcgtgttgcaccgtaattttcagggctatacgacccagggcgataccgatctgctggggatgggggtttctgctatcagcatgattggcgatggctacatgcagaaccagaaagagctgaagcgttattaccagcaagtggatgagcggggcaatgcgctatggcgtggtattacgctgacccgtgatgattgcattcgtcgcgatgttatcaaggcgctgatttgtaacttccgcctggattttaacgctgtcgaacagcagtggggtttgcatttcgctgagtattttgccgaagatttgcagttactgtcgccgctggcgaaagatgggctggtggatattagcgagaagggaattcaggtgacggcgaaaggtcgtttgctgatccgcaatatctgcatgtgctttgacgcgtatctgcgccagaaagcgcggatgcagcagttctcgcgcgtcatttagccgggttgcccggtggcgctgcgcttaccaggcctacacgttgcgacaacctgtaggccggataagcattagcgccatccggcacattgtcagctgaacagtcccaccagcgcggcacacaacacggcggctagcgcagtttgtggcgtgtggctgtcgaccgctccactcgataccagattaataatagattctaacataatgaatccccccgtttgccgggcatgatcatactgaactcatcggaacagtaaagcgcaaaatagcagcgttttgcgctcaattattaatctttacactcgcgggtaatgtttactccattcccagctttttcaacttccgcgttagggtgtttcgcccccaaccgagcagcctggcggcttcctgtttatgaccctgcgtatggcgtaatgccgtggtcagtagcgttctctccagttctggctgcgcttcagaaagcaggttttgatgaccggatcgcaaggcgcggtccgcccattgtgccagtaatgtagcccagctatccggcggcaggtgggacgggctatccggcgtcgaggcttcaaacagttcgcccggtaaatcctggatcaatacctcctgtccggcggccatgacggtgagccagcggcaggtattttctaactgacgcacgttaccaggccatgccaggcgcgttaacgccgtttcggtttccggatgtaataatttggcttccacgcctaattcacgggcggcgacctgcaaaaaatggcgcgccaggcgcggaatatcctcacggcgttcacgcaacggcggaagatggatacgaatcacgttcaggcggtggaacaggtcttcgcggaatttcccttcctgaacgcgtcgttcgaggttctggtgggtggcggcgataatgcgcacatcgacttttaccggcgcgtacccgcccacgcggtagaactgtccgtcagccagcacgcgtaacagacgagtctggacatccagcggcatatcgccaatttcgtccagaaacagcgtgccgccgtcagcctgctcgaaacggccctgccggatggtattcgccccggtaaaagcgcctttctcatggccaaacagttcggattcaatcaaatctttcgggatggccgccatattgagtgcgataaacggcgctttggcgcgtgggctatggcggtgaagcgcatgggcgaccagttctttaccggtccctgattcgccgttaatcagcacgctaatcgaagaacgcgacagccgaccaataatgcgaaacacatcctgcatggcgggcgcttcgcctatcatgtctgttgtcgggccgttaacctcgatattacgcggctgttgctgctcctgatagtggctaatcgcgcgctcgaccagagcgacggcttcatcaatatcaaacggtttaggcagataatcaaacgccccctgctgataggcgctcacggcggcatctaaatcggaatgcgcggtcataatgatgaccggaagcatcgggtgacgctgtttaatctgctttaatagcgccagcccgtccattcccggcattcggatatccgacagcaagacgtccggcgttttactggccagcgcagccagtacttcattaccattctcaaaggtggtacaggtcaaccctgccccggcgagagcacgctcaagcacccaacggatggaactatcatcatcgacgacccagactattcctcgttgcataaacacctctatttccgaatcggcaggtaaaccgaaaactcggtatgccccggccaactggtaaattcaattttgccggcgtgttgatcgataagattgcgggcgatagataacccaagcccggtgccgccttcgcgaccgctgaccatcgggtagaacagcgtatcctgtaaatggggaggaatgcccggcccattgtcttcaacgtctatacgcgccgccaggcgatagcgttcgccatgcagcgttaactggaaggcggtacgggtacgcagcgtaatttcgccgccttccggccccagcgcctgcaaggcattgcggacaatattcagcagtacttgctcaatttgttccgggtcgtgcggcagttctggcaaactggggtcataatcgcggataagccggacattatccggcagttccatcgacaccagcgccaccacgcgctccgcgactttatgtatgctctcggtaatgtgcattcccgggtgctgcggccccagcaaacgatcgacaaggttgcgtagcctgtcggcctgttcaatgatgactttggtatattccgttagcgccgggtcgggcagcgccttgctgagtagctgcgccgcgccgcgcaggccgccgagcggatttttgatttcgtgcgccagaccgcgcaccagatcgcgggcggcgatttgctgcgcgtgctgcaactgctcctgactcagacgacgctggttatccatcggcgccatttcgagcagtataaaatcgtcgggcagacgttgggcggtcaaagagagaatatgcgagcgactatcaatcaccagcgtcacttcgttatcggtaaagccttgccctgccgctaaactttcgcgcatcaggtcaatgtttaacgaaaaatagctcaacagttcaggtaacggcgtcccgaacagtttgcgtgagctttgcgcgagcaactgctgcgcggcaggattggcgtaatggattgccagcgcgtcgtcgaccaccagcacgctgttgattaacgaattgaggatctgcccagcatcgggctgtatgccgcttgccattcagcagtctcctggaaaaggttgcaccattttagtgcattatagctttttaccactaaaaagcgcgtgagatcagattgttggtggagaaaaaagcccatcctgggatgggctgaaagtttccacggcaactcaaaaactcctgacgcctttcacgctgctgctgcgttggctgccttcgcttaccccagtcacatcgctatctatgctcctggggatgtgctcagttgctgccttgcagcaacgcgaaatttgtcggatttttaatatacgattaaacgctgtagtacagctcaaactctaccgggtgcggggtcatacgcacgcggtcatcttcttcgcgacgcagcgcaatatacgcatcgatcgcttcatcagtgaacacgccgcctgctttcaggaactcgcggtccaggtccagcgcgttcagcgcttcttccagagaacccgctacctgtgggatctctttcgcttcttccggcggcaggtcatacaggtttttgtccatggcttcgcccgggtgaatcttattcttaatcccgtccagaccggccatcagcagggcggcaaagcacagatacgggttagccgccgggtccgggaagcgaacttcgatacggcgcgctttcggagacgccaccaccggaatacggatggaggcggaacggttacgggcggagtaggccagcatcaccggcgcttcgtaacccgggaccagacgcttgtaggagttggtggtcgggttcgccagggcgttgatggctttggcgtgtttgatgacgccgccgatgtagtacagcgcttgttcagacaggccggcatatttgtcgccagagaacaggttggtgccgttcttcgccagagacatgtggcagtgcataccggaaccgttatcgccgaacatcggttttggcataaaggtcgcggtcttaccgaagcggtgagccacgttatgcacgacatatttgtaaatctgaatttcgtcggcttttttggtcatggtgttaaagcgggtcgccacttcgttctgacctgcggtcgctacttcgtggtggtgcgcttcaacgaccaggcccatctgctccatgaccagacacatttcagaacggatatcctgcgcggagtcaactggcggaaccgggaaataaccgcctttcacgcccggacgatggcctttgttgccgccttcgtacttggtagaggagttccaggcgccttcaatatcgtcaatcgccacatgtgagccggagatagatgcgccgaagcggatgtcgtcgaacaggaagaattcaggttccggcccaaacaggacggtatcggcgataccggtcgcgcgcaggtagtcttccgcacgttttgcgatggaacgtgggtcacggtcataaccttgcagagtgccaggctccaggatgtcacaacggataatcagggtggagtccgcgaagaacgggtcgataaccgcagtggacgcatcgggcatcagcaccatgtcggattcgttaatgcctttccagccgccgatagaggagccgtcaaacattttgccttcttcaaagaattcggcatttacctgatgagcaggaatcgtgacgtgctgttctttgcctttggtatcggtgaagcgcagatcgacaaacttcacttcgtgctcgttcagcatcgtcaaaacgtgttcagcggacatacttgtactctcccggattggtcatggtcggtcgtcgtggtaacgagatcttcaattctgctggccgtgtcgccgtaaaaatataaagcgaaatctgtgccaactttcacattgcccccaaaaggcgttatcatgcgcaccatcgtgcaaaagggctgcaccacggtgactatgttgcaccaaaatagtgctttaatgtgaacattaagcaccacattggtgcaacagaacgcaagccacccttttaacgctccgtgaaagcgatcacaaagagactctgcaatacttgtttgcggaggatgtttgtgatcctgttttgtagtgcgattaatccgtgtacaataacgcgctatttctaatgcctgaggcaaagttgtgatcgaaaatttgcgtaacatcgccatcatcgcgcacgttgaccatggtaaaactaccctggttgataagctgctccagcaatccggtacgttcgacgcgcgtgccgaaactcaagagcgagtgatggactccaacgatttggagaaagagcgtggtattactatcctcgctaaaaacaccgctattaaatggaatgattaccgtatcaacatcgttgatactcccgggcacgctgacttcggtggtgaagtagagcgcgtcatgtccatggttgactctgtgctgctggtggttgacgcatttgacggcccgatgccgcaaacgcgcttcgtgaccaaaaaagcctttgctcatggcctgaaacccattgtggttatcaacaaagttgaccgtcctggcgcgcgccctgactgggttgttgaccaggtattcgacctgtttgttaacctcgacgcgaccgacgaacagctggacttcccgatcatctacgcttcggcgctgaacggtatcgcgggtctggaccacgaagatatggcggaagacatgaccccgctatatcaggcgattgttgatcatgttccggcgccggacgttgacctcgatggtccgttgcagatgcagatctcccagctggactacaacaactatgttggcgttatcggcattggccgtatcaaacgcggcaaagtgaagccgaaccagcaggtcactatcatcgatagtgaagggaaaacccgtaacgcgaaagtaggtaaagtgctgacgcatctgggtctggagcgtatcgacagcaatatcgccgaagcgggcgatatcattgcgatcaccggtctgggcgagctgaacatttccgacaccatctgcgacccgcagaacgttgaagcgctgccggcgctgtccgttgatgagccgaccgtgtctatgttcttctgcgttaacacctcgccgttctgcggtaaagaaggtaagtttgtgacttctcgtcagattcttgaccgtctgaacaaagagctggtgcataacgtggcgctgcgcgttgaagaaaccgaagatgcggatgcgttccgtgtatccggtcgtggcgaactgcacctgtccgtgctgattgaaaatatgcgtcgtgaaggtttcgaactggcggtttcccgtccgaaagttatcttccgtgaaatcgacggtcgtaaacaagagccgtacgaaaacgtgacgctggacgtcgaagagcagcaccaggggtctgtcatgcaggcgctgggcgagcgtaaaggcgacctgaaaaacatgaatccggacggtaaaggccgcgtacgtctcgactacgtgatcccaagccgtgggctgattggtttccgttcagaattcatgaccatgacttccggtacgggtctgctgtactccaccttcagccattacgacgatattcgtccgggtgaagtgggccagcgtcagaacggcgtactgatctccaacggtcagggtaaagcggtggcgtttgcgctgttcggtttgcaggatcgcggtaagctgttcctgggtcacggcgcggaagtttatgaaggccagattattggtattcacagtcgctccaacgacctgacggtaaactgcctgaccggtaagaaactgaccaacatgcgtgcgtccggtacggatgaagcggtgattctggttccgccaattaaaatgagccttgagcaagcgctggagttcattgatgacgacgaactggtagaagtcaccccaacctctatccgtatccgtaaacgtcacctgacggaaaacgatcgccgccgtgcgaaccgtggtcagaaagaagagtaattaacgctcttacggataaaaaccctgccgaaatgaaagctcggcggggtttttttattcacgttgagaaagggataaggttgccaaaaaatcagcaatcgctggcgtattatgccgaccaatgacgctatccgcatacacctttgcccgagcgctggcattccccatcgcgacgcccaatccggctaaacgtagcatttccgcatcgttatcattatcgccaaacgccatcacttcgcgcattgcgatatgctgttgctgtgcatatctggcgaggctttgtcctttgctacaccccttctggagaatatccagttgatgatgccaggaccaggtacagcttagatgtaattcatgctgtataaactcagcaatattttgtagttgttttatgtgccgatgaacgatgctgatttgccagatattctccctactgcttagctcatcagcctgaaagattattttatcatcagcacgaattgtcggtttaagcggatatacccgcgccagtattttttccgtttgtaagtgcgtcagcggcagcgggtgaaggatctgctgttgagccggttgataaatatagcttccgttacaacagatcatcggttcggtgagcgccagcgtttgataatacgcataggcttcacgatgagagcggccggtgacaagcattattcggcagcccatgtcctgcatctgacggatggcggttagcgactctggcagaatttgtttattacggtttagcagcgttccatcaagatcaaaagcgattaaacgatatcgcatgagcgtccgatcctaaaacagcgtgaggcatccaggtgattcagcaatggaatatcgagacggtgctgataagcgagaaaacagtggcattgctttgcctggcaggcgggagaattgagccgttgttgatataaattacccattttaattttgctgatatgacaagcaaaaagatcgccttctgcattcataaaaatactttttcttcctgcggtacagatatccagctgcgctggccactgctgcgtttcaatcacatacagcggatcgagttcgccgaaggcgatggtttcctcaacggtatgccgggtattggcacactcgttggcgttaaaccaaaaataattctggtcaggcaactgctggcggagccaacgaaactggtcgatatctttcatactggcgacagcccccgcgcaccaggttattccggcggcagagagcgctaaacactgctggagaaagcgctcagcggtaatttgtgagggatgaaaagaacaccataaccgaagctttgagatatctccgccgccagcacgaaatgattccagcaatgacattaacgaaaaagaggcgttagtttgtatgccgaccgcctgaacatgaggatagcggctaatttctgccagcgccgccatgtaataacgcaagcgtagcgcctcgccataaggcgtaatcatcacattcaacggcgtacctaaaagaggcaaatggtcaaccatgcgccatagcgcggcttcgtcgcgttttttatcgttacgggcgtgtttatggaacgggcaatagccgcaatgataattacacgatttaagatagccgcgataaaacagcgtgtgaatatcgcgcagggcgggggcgctcatctctgccgattctcccgtagcatcacctcaggcgaaacgaacacaggagcaaggcaatcggataatgccataccggtctccgttagccggaggcgactgccattctgatagcagtaaccctgccgtatgaagcgttcaaggtcggggaaatcccttagcgcatcgctggcaaaatattgctgataatcgctaagagaaagtccctgccagaaaaatagatttttaatgataaagcggcgtttcatttcatcagggggaagcagataaccgtgattaatgacggttttatccgggctgtcgataaacgcctgaatgatttttcgtgatgtttgcaggttcgacgaccacggtgaacagtaatgcagattgccaagataacttctgccgcccgcgccgagcgccagtgagttttcaaatccgcagctttccgccgcggcggatggcgctggattaaggacgaaacggcgcatggacgtttgggtgtagcccgcgttgcgtaaaagatcgcgggctaaaacgtagtagctatgcatattttcctggcgaggcatattataaagcggataaagaaacagctcttccggttgataaacgagcgcctgatgtaatgattccgtcaggcttgcgtgagtctgtccgggaatgccataaataatatcaatattgagtgatggaaaatgacccgcctttagccattccagcgcctggtgcgcgctggcggcattgtggcggcggtgcagcgtatgtaactcgctatcatgaaaactttgtacgccaatactgacgcgattaacggaaaaggcgtttaatagcgctactttttctgctgtggtatccgtaggggaagtttcaatcgttttataaatattccagtcaacattgagcacatcaaagacggaaaaaaataacttctctaattgcgcaatatttaatagcagaggtgtgccgccgcctacggtaaagcttgcccagtgggcgggcgccagcgccatttgtcggccctgggtaataatcgcgtcgatatagctatcaatgaacgtattatctgcgccagtgcaggtaaataaattacagaacccgcagcgactttgacaaaagggcatatgaacatacagatgtgtgtcgtgctcgtaaatgcgcggttttacttcgctaaagctgacgttctccagctcccgataagccgtcttatgcggataactgtacatatactgacgataaatatcattgttattcatattaatgattacagctcagcaagaaatgcatatagggaacggtattaacgatcggatgattaaaactatggaaatatttcccgtcttcgccatagcaggtaccgtgatcggaacagacaataacgaacgtttcgccgccagtttggcggaaaatgttcagtaatccgtcgatgcgggcgtcgatatagcgtagcgcggcggcatgggtctcaacggtatcgccaggggccgcgccctcaacgtaaaaatggttagggtaatgaatcgtgtcgatattgatatacatcatgaccggttggctgccagcacgctcggccatgattttctggatataatggatctggttatccatactctctttaaccgtacaggcaaagcgtggatgccagtaactctctttaaacatcgacgggaacacttttcccatgccggagcggttattaaagaaagagacgccgccaatacagatggtctggtagcctttattttccagactttttatccatgttgcgtcatcaaaggcaaatgcatttttcgggcctttacgaccaagtccgatatcttttgggaaaaacagcatggtctgattaacggtatcatcaataggttttggcataaaacctgaaaacatggcgtgatgcgaaggccaggtaaaattaccggccgcttcgcatttcgtccattgtccataatgattaaggttgggcgtatttccggcggtttgttcctgaagcgcaatgtcgtagcgtaacgagtccagcacaataaaaagaatatgagcgttattactaattagcgcattcatatcgaattcgccatcgcctgtgtcaatcgacgcgtgcagcgagacggggacttcatccattgaattatacattttgcttcctcatggcccggatttgcgcctgataaattagattattctgctgcgcatcctgataaatcaaatcaccctggccattaatttcaataatatacggcgtcaggctggtggtaagtaaaacatcaatacccgctaagcgaatgccagggaaaagtcgcatggcattttgacagagcgtatcgatcccagtcacttttgcggcagataactccagactttcgaagcagtaagcctggttttgcagatgtaagttagtaatgggctgcgaggaggttctgaccactcgccagataatttcgccatccaggcagacgatgcgtaaatcataggttttatgctttacgctggctttgggcagccactgttcgacgaggttttcctgctgaagaacgccattaataatgagctggatatcttctttctgacgatactgttggatttttttgctgttaaatagctgttgtcctgatatgacaatcgcgctgtaaagcacctgctttatgccatcagggtggcggcgcaaagcgataacgcccgccgcgccagaacccagcgagggcttaatgaacacgctggcgacccttttttcctccatgatggcggtgagctgtgcaaaactttttacgtcttccgctaccaacggcggcgtggggatgccgtgttccagtaagcgccgcttgcagcgttttttatccaacaggtgaatgaggcccgccggatggttaagccaggtgacgccaggacgcgccgccatgttctgcaaaaaatggatatagtccagaccgatcgcgtttattttgcggatgtctgtttcactgtgtactggcgggtcgattttaacgatgccagaggtcagcgaagcgtccagcgcttgcggatgagtcagcgccgtgacgggttccccaagtacggcggcagcctgcataaaataatgcgtgcgcttgctctgatgggggccaatgagcgtaatcacaataaatccctttatcgttgagtaggggaatgtgcacattcccctactcaatcactcggtgtacatcgcattcatataaatatcgccatcgtgatcatcaggctccagagcttctgaaagattcaggtttatcggcagtgtggcttttagcttttcctgcatctccggcgtcaaatagtggtggtggagatcgagtgtttccagatgcgcaattcggtctttatgctccagcagcgcctctgcgccgttgtccgttaaggtaccgcatgagagttccagcacgttaagctgcggcaggatattactttccagcacccggcgggcgatatcatcctgctcttcgctgttcatcaaccccagatgggtgagctgagggaaaagatctttcgatgccagcgccatcacgtcatccagcgaaccgtcaaaaccgtatccctctacgcccaggaagagcttcagcgtttttaatgcagggagctgcgcattttgtagttcggcaagtacgttagaagggatgccgccggaaatgatttccaggtgctccagtttctcatgatgtatagcgcccagtcgcagatccgacgcgcctttaataatcagttctttcagattgggtaacgccgcatagagcctggaatagtcaccttgtttaatccaggagatctcgcagtcttcgctctccatatcaccgataaacagtgattccaggtgagtaaagcgggaggcgttctccacaatcatatcaataataggctggcaggtttcgtcttcccaacaatcaccccagttaccaatggtcagtgagcgaagctttggcagatcttcatcggttaaaatcaaattaatgagctgttcctgggttaattcattgtcccaatcaatattaaatcgcttattcatttgtttcccttctctataagcatgaatatggtaaaacgctttgcgaatattatcatggcgcttaggggcgggatatcgggagtctgattcaggatgaatgagcgggcagaacaactacccgctgtgatgctgattcgtaaaatagaggcaataatatcagaagaaatacttcgccccgatacgaatctggttttgctctctatggtaggggcccacgttacgatctaaccagcgtaattcaaagtagggcaaccagtgttcattgatacgataacggaaggtattagtgatttcccaatgatgcttcgtaccattactactattaaaatcattaacgttataaaaatagtgtggttcaaaggtataagaaaatttatcggtaatgataaaattccaatagttaccgatttcatagctgtcattattatccagttcgccattcaaatcggttgaactataattattgtgattatatcggttacgtaccgtaagattaaaccacggggtaaatttatagttaacatccagatagacggcgccgccggaaccaatgcttttgtcgtttattaaccccccaggctggatggttaatttatctgtaggtttaaataatggataccagccctcaatctcattataaccgtgctttaattcatcatcacgctgtagcgtataggtattggtcaacataattccggcccccatatcggagttatagccgacgcgcagcataaactccatttggtcagacgccaggttataggcctcacggttttctacataagcgccagcaaaaacagaggtggatattactgaagttaatatcactagagtattcagagatttcataataaatccatttttcaaatatagggaagccgccatccatcgggatggataaagcggcaagcgtcgtttaattatttacagtagaaatactttgtttattattagtcgcgacaatttgattacctgttttctttcgttgggcaatttcctcgataataaaagcgaaacgttgttcattgagcttataaaaaaagcccatcgttagtgctgcgataatggcaagaccgcaaggccataaaaaaatgagctgacgcaaaccaagcaacgtggtgtcactttgagctatgttggggatataaccgatttgcgtcagcataatacctggcaaaaagccagcaagcgcagcggaaattttgcgggaaaaggtataacccgtatacaccgagccttcagcgcgaatacccgttttccattcaccgtggtcaaccgtatccggaaccagcgcccagttcaggctgttgacgaaagcggtaccgaagaaggcgatacaagagaaaataacaaacaggaatgacgttccaccccagataaaattcaggatatcgccaacggcccacaatatcagaccaccaagataaacctgttttttcccgaagcgttttaccgcagcaggtactaataaaacaccaatcaggatacagcccatgctgaaaaaacccatccatgacaacaaatgaatatcgttcagcacgtactgagtgtaataaacctgaatggccagcttgatattaaaggcggccagcgtgcacaaattggcaacgcagagcaccagcagcggcggattacgaaaaatcgcgcagaaggacttcaatatgctgggtttatgcgtgtcaggtacggtttcgatataccgttcttttaccccgctaaagcaccaccacatgctgaacagcccgcagaccgaaaagatgactgctgcaatcagataacccagcgaaggggaacgggtaaacagcgcctgaatgggcataaaacctacggtacaaagaagaaggccaatggtagcgccgccttgtcgccatgcggcgagctgggcgcgctcatgcggatttttggtaatagcgggtaccatcgcgccgtatgagcagttcatcaggctgtagaacagaccgaacaacataaacagcaccgtcgcgaaggctgttttaacgggtaaagtaaagtgagtggcaaagaattgcgcagtagcaaccagagcgactggaaatgacgcatacagaataaaaggccgaaactttccttttgcgccaatattacggcgtgagtccagcaatacgccggtgagcatatcggtaaaagcggtgaagaatttcgccaccagaaagataattccaccgtaatatgcaggcatcccgagttcatcggtataaaacttcagtagatacagcgtaccgatacacagcatcagatttgagccgaaatcgcccacgccataggcgcatttttcccgcaggctcaactttagcgttagcggatcatgattagacataatcgcctctcaaaacgccccgcagggcgttatattttattgttgttaaaccgtatgtttccgggcctcaatctcttccacaattcgcacgtacatcttctcgttgaggttgtagaaacagcccatcgcaataatggtgatgaccgccagcacgcaaggataaataaagatcaactggcgtaggccttcgacggtgcctgccgattgcaccacattcgggatataaccgatttgcgttagcatccagccggggaagaaccctgccagcgcctgggagaccttacggaagaacgtgaagccggtgtaaaccgtcccttccgagcggacgccggtgcgccattcaccgtactccaccgtgtcggaaaccagcgcccagttcaggctgttgacgaaggcggaaccgaagaacgccaggcaggagaaggcgacaaaactgaccgagccgccgccaaagaagtagttgagcagatcgcctgccacccatattaacagcccgccgatatagactttcttcttgccaaaacgccttacagcgccgggcatcaaaaaaacgccgataaaaatacagcccatgctaaagaagcccatccaggagaggaggatcgggtcgttaagaacgtactgggtgtaataaacctgaatcgccagtttgacgttgaaggcgccaagagtacaaaggttggcgatacacagaataaacagcggacggttaccggcgatggcgcggaacgactgcaataatccaggcttttgcgcgctatcgacaggtttcacttcgacgtagcgctctttaacgccggcgtagcacagccacataaatagcaggccaaacaatgaaaatagcgtggcggcgaaaatatagctgagttgggcattgccttcgatcaggttcatgaccggcacaaagccaacggtacacagcagcaggccgagagtggcgccgccctgacgccaggcggcaagcgaggcgcgttcatccgggttcttggtaatcgcgggtaccatcgcgccatacgagcagttcatcatgctgaaaaccagcccgtacagcataaacagcatcgttgcgacgacggtttttcccgtcacctcaaacggtgtgccgacaaagttagcaatcgccagtagcgttaccggaaatgccgcgtaaagcacgaacgggcggaatttgcccttcggaccaattttacgccgcgagtcgagcataatgccggtacccatatcggtaaatgcggtaaaaaatttggcgatcaggaaaatgatcccgccgtaagtccctggtaaacccagcacatcggtataaaatttgagtaaatagagggttccgatatctaacaggatattagaacctaaatcccccagtccataggcaagtttttctttaaacggcaagcgtagggttgccggattcgatgatgtttgactcattattcttctccatctgcccgcaggtttccctgcgggcgagccgtattagatattccgtaaagaagcaaaaagtgaagcccactcgctcttcgcgcgatagaagaccggcggcttgccaatgggcgcatccacggtaatttcaccgccgtggtgagcttcgccggtccagatattcacccagtgatcttccggcaggtacagcgtccagtcgcaacgcccctgctcgtgaaccggcgcgaccagcagatcctgaccgagcagatattgatatttcagggtgtaggttgcggcatcgttctcgtaatgcaggaatagcggacgcatgaccggcagaccggtagccgcgttttgcgccaccgcctgcttgagatacggtttcagcgtggtaaagacggtggtcatgcgggcaaagtgggcaatagtttccgcgtcgccgtcgaactgccagttatcgccggggcggttgccttcatgggtgcgcatcatcggcgtaaaggcgctgaaatcgcaccagcgcagcagcaactctttgctgcgtttcatgtcaaacagggtggtgtagccgccgatatcgctgtgatgcagaccatggccggtcattgccagcgacaatgccgcaggcacgacagaggccagaccatcatcaaggctccagtcaacgttctggtcacctgcccacatcatggtggaatatttctgactgccggtgtaacccgcacgcataaagaacaggatctcgccgagcttgccggtctcctgtagcgcttcgtagttacatttcgcccagagcgcaggccaggcgttatgcatgatctcggcgctgacgccgttgtgcagatacgtgtcggtcggcagatattcgccgaaatccgccatccagccgctgcagccgagcgcgatcatgctctttttgatgacgtctttgaaccagtcgtaagcttcaggattggtcagatcgaccacgccgccatagaattcgccaaactcgaccagatagtcgccgcccgtggcgtctttcgccagatagccgtgtttcgccgcctcggcgcagaggtctttatcactggcgacgtatgggttgatataagagaggaactggacgccttcttctttccactgtttgatacggctatccagctgtggatagttgtcgctattccacttccagttccacatcacgcgcttgccaaaggaggtcatgcggataccggaccagtcctgcgcccaaataccgttcacttttacgcctgcgttgcgcatggtatccagtttttgctggcaaacttccgtaccgccctgaatgcctagcgtgacgccgtcgtaaacccagtccggcagctccggctggcgacctaacagcgcagtcagtttttccagcagggcgatgtaggtgtcggcacactcaaaacgtagcgtagttttatcttcccacagcgccagttcgtgatactccggcgcgctgaagtcgaaattcatatagcagctattatcgacgtggcagtaatacttctgcgtgctgacaaaggtcggttgcgggaagaaggtccagtaatagtcgccgccggcgttctctttacagtctgcctgccaggtgacatagctggttttattacggccaacgccctgttcgctggtccacagcgggaacggcttgccgcgcaaatcgaaataagagaactgttcgccgcagccgtagatatggtcgtctggattagctgcgagacgtaaccagatacggttatggtgcaggtcgtcgttttgcagatccagctgcaggcgtcccgcttcatcggcggagatgcgaagggtggcgctaattgttgcgccacggctgaattgtaccagccagccgtcaggtagctcgctgacggtggcctccgttaatgcaatcttttcgttaagtttgtctttgatgctaaagttgccgcgaaacatgtcaatgtcggcaacgcccgcgccaatccacagacagggattttcggtgctgtggcgtaaaatcaggcgctgttgccagctaagcgcaaaaccatcctgtgatgttgtcagttcaaaatcggttgaccgttgtggtagagaattcattgtaatctccgtgaatgtagggtaattcggtaatccatttgggctagtcgcagccgatggaaaaatgcagttgatggatcgcttttggggcaagatgaatcagtgcgatcccggaattaaatgcatcgggcgggcagctcataggctctaccgcgagaccttttcggctgagtttttcgccggtatagatctgtaaccagggctgggtgctgcgtaaaaatgtggacatgttctgcgttgggctggtaagtctgacctcccactcagccggggtagtcgcggtcttaaccgcatgatcaaggcgcgtttcgccgagcaggcatgatgcggaaaaatccctgcctgcgggcaattcttcgcttgcaggcagtgttaatacacagctatcgatgctttgcagattgcaagtcaaataaggatgcgcgcccgcgccataaggggctgattcatcgccaatgttttgcgtacgaatcaatacgtgcagcccactggcggcatctaaccgataaatcacttccgatatcaacgcaaagggatagccgtaagagggcggcagaaaaatcgttagcgacgcttccgtcgccgactgataattaatctgccagtctcgccaggctaacagaccgtgaatggcggtctgcgaaaccgggtcgttaacggcaagctggaaaaccttgccgttataggagtagcagccatttgtcacgcgatttggccagggaatcaatactttccccagatgcgccatgggtatttcttccggtttatgcgggatgaccacatggcgtccatgatgggtcagttccgccagacctgcgccaaccgtgacgattttcgcctggtaatggcccgcattaagctgaatagtttttccaccgctgtgcatggctgccatcctcatgacctatttcgcgttgatatccaggagacccgccgcgaccgccggagccaggcccggcgccagtggcagacgaggaatgaccagacagtgcagcagatggtaaatatcttgcttgccgtcccacactttggtggtcactttgttatcggcgtccagctcttgccaccaggaaccattttcatagtccatcaggtacttaatgcagtagtcccaccatttctgataccactcttcatactggctatcgtccgtcagggtgtagagggcgtaggccgtacccatcgcttccacaatcggccagcgcacgcgttcacgtacgataggtttaccgtcccagtcgactgagtagacaaagccgtctgcgccatctggcgcccaggcgtcgcggatagtggcatggaacagacctttcgcatcctccagcagccaggcgggtggcgtttcgaagcgggcctccagcgcagcatggagatggagcatcagacggccccactcaatccagtgaccgggcgtaccgccgtaggcgcggaaacggtgggcaggattatctttgttatagtcgcggatagggttccactgtgaatcgaagtgttcattgacgcggtaatcaccgttgcgcgccacatcatgaataattaccgacgcgatacgcagcgcgcgatccagccattttttgtcatgggtaacgtcataaacaatcaggaacgcttcgacggcgtgcatattggcgttgccgccacggtagtcttccgtctggctgaaggcttcatcccaggactccaggcacatctgctcttcttcactccagaagtatttctcaatcacttctatggtgtaatccagcaatttcctggcttcaggatgcccggtcgtgacggcgctggccgcgcccagcaaggcgaagaagtgttgataaccctgtttagaggcatctaccacgccctgatcgttaacgcaggcataccagccgccgtattttttatcgcgcagcgcgccgttcatggctttgatgccgtgatcgaccagatcataagcgcccggtcggcccatcgacgccgccacggaataaacgtgcagcatacgcgccgtgatccaaagatgggtgcccatctcttctttgatttgccctttatttcccagccagccgaagcctgtcggcaccacggcgtttttaccgaaattaaagatgcggtcggtttcctgctccagccagcggttgtggctcaacgtgttaaaccatttcattctgtcatcctcgtattaacgacgttttgccatcatttcatcgacgatctcgcccagacgttgcaatttaggcgcggaaacatcacgtagcatcagctcggtatccggtaaaccaattactgatgaccagaccgcgcgtcccgccaggaacccggatgcgccagcttccatggcgaccctgactgcgcgagggaacagtttttcgtccacaccggaagagaggatgacccacggcatattgatatgcccattcaggcgttgtgaggcggtaagaagatcggaacgtgcgcctttgccgtagagcggcatttcaactttgtaaagatcggcgccgctgtcgcccagctctttggccgcatcgataatcgcctgctcgcgatcgaacttgtcgccgcagcgcggcggacgtacaaccggttcgataatgctcagcaaaccattggagtgacataattcattgaattctttgaccatattcagacgctgctgcgcgtcttcgtcgctgcgccacagcaccaacagttttaaggctttcgcgccgtcccgttttaccgcctgcgcattaatttttttatcaaggaccacgttatcaacgggaataccgttgcccgggatgaaatcatccgccgcgacgatcatggcgcagcttttagcgaccgcgttttgttctacggcctggcgataacagaactgctgatccagcagaacggcagaggcatacggggaaagaattttcgccgcattcactttgaaatccgtcagcacgctatcggcaacgggtgttttcgcaccagcagcagcaaacattaaacgcatcgcctcgcgctgatcgacagccagcatggcaaacccgccggacgctcgcgtaatgtctttgatggtgtagttgttcattcaattttcctttatacagtcgttacttttttacgttggcggtcagcccggcgctgatgcgcacctgttccaggatggcgctccagtcttcccgaccgcggcctgcggcccgcgccaggttataaacttcacgggaggcggcgccgagcggcatcggtacgtgcagttgattggcgacatccaacgcgatgccaagatctttgtgcgccagatcgatcatgaaggcgggagacagatctcctttcatcactttattcggccaggtggtggtgaaatgccctttgcctgcggcagtgccgctcatcacttttaaagccacgtcgaaggaaagccccagcgcttcacacagcacggcggcttcggcggagagcgcatttagcgcaatactcatgtagttgttgatcagttttacgcgaatacccattcccgggccgccggtgttgaccagctcattacccatcgccatcagaacaggggtagcacgctctacttgctccgccgtaccgcctgccagcagcaacaatgtgccggtaatcgcgttgtcggatgtccggcctaccggcacatccatcatgctgaaccctttgctctgcatgtcggcaatcagattatcggtttgcaacggatgaatagtggacatatcaatgaccagcgcttcacgggaaagagtttcacaaacgccttgctcgccaaacaaaacggaacgaaccagatcgccgttcgggagcatggtgataacaaattcagcgccgatggttgcctgagccgggctgcttgcaggttgcgcgcctttgtctaccagacgctgtacggcgtcgggattaacatcgaagacgctgagttgatggccctgctttagcagattgctcgccataggggagcccatctgtcccaacccgataaatgctataactgccatatcgttctcctgaacacggtggtgtcattttttgtcattaatgagcatttttctgtctgtttgtgatcgtatttgtaatttatagtcaaaaaattgacagccgtcactttttaaacatttcgtgaaattaaaatgagcacatcgaaaatgcttgaggaatgaccatggttcgtattgcttgtgtaggtattaccgtgatggatcgcatctattacgtggaaggattaccgacagaagggggtaaatatgtggcgaagcgctatacggaagtgggcggcgggcctgcggcgaccgctgccgtggctgcggcgaaattgggcgcacaggtggactttattggccgtgtgggcgatgacgacaccggaaacagcctgctggcggaactggaatccctgggggtaaatacccgctatacccgccgctacacgcaggccatgtcgtcgcagtcagcgattatggtggatgccaaaggagagcggattatcgttaattatcccagcccggatttattacctgacgccgactggcttaacgacatcgatttttcgcagtgggatgtggtgttggcggatgtgcgctggcatgacggcgcaaaacaggcgtttacgctggcgcgtcaggctggcgtcatgactgttcttgatggcgatattacgccgcaggatattagcgagctggtggcgttaagcgaccacgccgccttctccgagccagggctggcacgcctgacggggatgagcgaagccattgatgcgctaaaaaaagcacaaatgctcacaaatggacatgtctatgtcacgcgaggcagtgaaggctgcaactggttggaaaaagcggcggtacgccaccaaccgggttttaccgtggaggtggtggatactactggcgcgggcgatgtttttcatggcgcactggcatttggcctggcaagcggatacgccatcgaagaggctgtcagattcgccagcggcgttgccgcgctgaagtgtacgcgcccgggtggccgggcgggtatccctgattgtgagcaaacccgatctttcttgtcactttttgtataatatgagcagtaggaagcttttagaggaatgctcatgagtcttaccgaactgaccggtaatccgcgacacgatcggctgttaatgctaattgatgagcgcggctatatgaatatcgatgagttagccagtttgttggaggtctctacccagacggttcgccgcgatattcgtaaattaagcgagcaggggctgattacgcgtcatcacggcggcgctggcagagcgtccagtgtggtcaataccgcctttgagcagcgagaggtctcctggacgcaagagaaaaaagccattgcggaagccgtggctgactatattccggatggctccacgatatttatcacgattggaacgacggttgagcaggtggcgcgcgcgctgctcaaccataatcatctgcgcattatcaccaatagcctgcgcgtcgcgcacattctttataataaccctcgttttgaagtgatggtgcctggcggcacgctgcgcccgcataatagcggcattatcgggccatccgcggcggcgtttgtggcggggttccgggctgactatctcgtcaccagcgtaggcgcgatagagagcgatggcgcgttactggagtttgatgtcaacgaagccagcgtagtgaaaaccatgatggcccactcgcgacatattttgctggccgccgatcatacgaaataccatgcttctgcggcggttgagatcggcaatgtgtcacagattaccgctctgtttacggacgagtatcccggtccggcattacagaatttacttcaatcccagcaaatcgaagtggttcaggtgagtccttcgctggacgacgccgtttcagcgtgacaagcgcccttgcgccggagggtcgcgtcagcgctttatccggccaataaaacggcgctgtgatgcaggcgatattgaacatcgtctgcgtttctattgtctttttgttaattgatttataaagggatacatagtcaaacttctcctttcccgctacagttattcatccccggttagcaaggagaatgacatgctctacatctttgatttaggtaatgtgattgtcgacatcgactttaaccgcgtattaggtgtgtggagcgatctgagtcgagtaccgctggcttcgctgaagcaaaaatttacgatgggcgagacttttcaccaacatgaacgcggtgagataacggacgaagcgtttgctgaagctttctgtcatgaaatggcgttatcgctcagttatgaacaatttgcgcacggctggcaggcggtatttgtcggattacggcccgaggtgattgctatcatgcataaactgcgcgagcaggggcatcgcgtggtggtgctatccaatactaaccgactgcatacccacttctggccggaggaatacccggaggtgcgcgctgccgccgaccatatctatttatcgcaggatttgggaatgcgtaagccggaagcgcgtatttatcagcacgtcctgcagaaagaaggtttttccgctgccgatgcggtctttttcgacgacaatgccgataatatagaaggggccaaccagttggggatcaccagtattctggtgaaggataaagccaccatccctgactatttcgcgaagctgttatgctaaaaaccgttcaccaaaaagctggacgccatacgcgccctgttcgggcctggctcaagctattatggcagcgtatcgatgaggataatatgacgactctggcgggaaacctcgcctatgtctcattactctccttagtaccgcttattgccgtcgtttttgcccttttcgctgcttttccgatgttttctgatgtcagcattcagttacgccattttatttttgctaactttatgccagccaccggagacgtgattcagcgctatattgagcagtttgtcgctaattccaacaaaatgacggcggtgggcgcctgtggactgattgtgacggcattgctgttgatgtacgccattgatagcgccttaaacactatctggcgcagcaaacgcacacggccaaaagtgtactcttttgcggtgtactggatgatcctcacgctcggcccgcttctcgctggcgtcagcctggcgatcagctcctacctgctttctttacgctgggccagcgatctgaatacggtcatcgacaatgtattgcacatccttccgctgctgctctcgtggatctcattctggttactttacagtattgtcccaacgactcgcgtaccgaaccgtgacgcccttgtcggcgcgtttgtcgcagcgttgctgttcgaggccggaaagaaaggtttcgcgctttatatcaccatgttcccgtcatatcagctcatttatggcgtactggcagtgatccctatcctgtttgtctgggtatactggacctggtgtatagtcttgcttggcgcagaaataactgtcactctcggggaataccgaaaactcaaacaagccgcagaacaagaagaagctgaccaaccatgattgcattaattcaacgcgtaacccgtgccagcgtcaccgtggaggacgaggtgacgggtaaaatcggcccaggacttttggtgttattgggtgtcgaaaaagaagatgacgaacaaaaagcgaatcgtctgtgcgagcgcgtgctgggataccgtatcttcagcgatgctgacggcaagatgaatctgaatgtacaacaggctggcggcagcgtgctggtggtgtcgcagtttacgctggcggcagataccgagcgcggtatgcggccaagcttttccggcggggctgcgccggatcgcgcgcaggcgctttatgaatattttgtcgagcgctgccgccagcaggcgataaacacgcaaaccggacgcttcgctgccgatatgcaggttgagctggttaatgacggccccgtgacattctggctccaggtatgagtcagcttccggcgtggccgcggataacaagagagagtacggctatgtatcaccttcgagttccgcaaacagaagaagaattagaacgttactaccagtttcgctgggagatgctgcgtaaaccgctgcaccagccgaaagggtcggaacgggatggctgggatgcgttggcgcaccatcaaatggtggtggacgaagaaggaaatttagttgcagtgggccgcctttatatcaatgcagataacgaggcgtctatccgttttatggctgtacatccctcggtacaggataaagggctggggacattaatggcgatgaccctggagtctgttgcccgccaggaaggcgttaagcgcgtcacctgcagtgcgcgcgaagatgcggttgagttctttgccaaactcgggtttgtcaatcagggggagattactacgcccacaaccacgccaatccgccattttctgatgattaaaccggtagcatcgctggatgatatcctgcatcgcggcgactggtgcgggcagcttcagcaggcctggtatgagcacattccattgagtgaaaagatgggggtgcgcattcagcagtacaccgggcaaaaatttatcaccacgatgccggaaaccggtaatcaaaatccgcatcacacggtgtttgccggcagcctgttctccctggcgacgctgaccggatggggacttatctggctgatgctccgtgaacgccacctgggcgggacgattattcttgctgacgcccatattcgctacagtaaacccattagcggaaagccaaacgccgtggctgatttggggtcgctaagcggtgatttggacaggctggcgcggggtaaaaaagcgcgtgtccagttgcaggttgaactgttgggcggcgagaccgccggagcaattttcgaaggcatttatatcgtactacctgcgaaaccgttcggcccgtatgaagagggcgggaatgaggaggagtagctggacatatccaactactcgatgaaggcatctgctggtagtttgaagcgttgtgtaagcgctttaatatgattaaccgttagtgctctgcggccatttaagatgttgctgacgttcgatttagaaccaagttcgttggcaagatctgctgctttgagaccgtattgatccatgagcgttcgcaatactgaaacgccagggggcgttttctccaggtgttggttgagtgctttgaattccggcgcatgtttttcgtattcactgattcgggcacagagcaattcaaatagtgggttttcaagatcgtcgtggtcgaccagaaactccactagcgctagtgccctgcgatactcattgtcatttcggtcttcccccatcagtgggacggtttttaccgcatcgctgaaggtatcaacgatcttttttgcgctggttgcatccatctgacgatgagttctcattctttattaccccgatagtatgcggtcagtttgtcatattcggcatgggaaacgatatgtttcacaaatatcttatgtaacctgaaatctatgtaggaaatgagtctcaggctgttaccagaaacatcaatcacccaccatttatctctgtacttaaaattatccagtgaaggaatataccgcttcatctcttcaggctgagtgaatgtttttttctccagaacattcagcaactcagtgagagcaagctcatggtttggatacatgagcatcgcttcattgaacggttttcggctgataacatgcacaatgtagttccattacaaagttttcaacctgaaaacaatttagcgcaacgttatccagttttcaagttgaaaacaaaattgaattttaggtcattttgcctgttgatggacttacaacacgccaggccacatctcgcatggcgcttcgtgccgcctggctcacgcctccgagctggaaaaagccatggatgacaccgagatagcgctggcaagtacattccacaccctgttcctggaaccgttgatacagggcctcgccctcatcgcgcagtgggtcgaattcggcagtaatgatgtgcgtggatggcagtccggcgaagtcctcacgccagagcggactggcttcaggatgcagtggatcggttcgcggcatatacatctcgtagcctgaaagcagcgtgtcacgcgtgataatgtaatccagcccattacaggtgtagctcgcaaacctggcggttgcgtccagcatggggtagatcagaatcagctgtgcaggttgccattgacgggcggctttcaggcgtagcgcggtgaccagcgccagatgcccacccgcgctgtcaccagcaagcgtaatgttctcgcgatctatccccagtttctgggcatatttccagatagtattggctccggtttcggcatcgttatgtgcggccgggaaggtgtgatctggtgcaagtcggtactgtgccgcaatcacgcgacaacggctgtaaaaagctaactgccttaactggttatcgtgagtggcaaaaccgccgctgacaaagcagccaccatgataataaatgatgcagggtaatttccctgtggcattgagcggcgaaaccacgcgaaacgtcatggcatcgagttcaatatcttcaacctggacgcgggtttctgtttctcctgccagtgtcgtgctggcgatgtagcccgccctccggtcatcaatattctgttcgcgagaagaggggcggcccgcggcgataaacccagcgaccagttcggcaattcctttttccagtggcatataacgctcctttgactgtatgtatgtacagtttataacctggttcgttggggatggaaagtggtgaaacgaggggataatgattctggatagaggttcgcaaaaaatggaatgcggttggcgctgggtttttaatttttgtactgtgaaacgatgatgctatacgccattgacgtatagattattttcactactataagccaatggcgtatggaatatgcaatttatagaaacggaactctttactgaagatgttaaaaaactgctcgatgatgatgaataccataagcttcaggtttttatggctcagcatccagattgtggtgatgtcattcaggaaacgggcggcctgagaaaaatgcgctggggagcgcgaggcaaaggaaagcgtagtggcgtgcgaattatctattttcaccgtagtcaacggtatgagattcgcttgcttctgatttatcaaaaaggcattaaagatgatctcacgccgcaggaaaaagcggtgcttcgtatgctgaatgagaggtggtagatggataaagtgttatttgagcgattaactcaaagtatgtctcaaatgaatgaaatcattgaagggacccgtgaaccttctcgtacctttcatattgatgcaatgaagattaaagaaatacggcaggcatctgggttgtcgcaatctaagtttgcagagctgatttcggtcaacgtggatacgctgcgcaactgggagcaaggaagacgttcaccgacagggccagccaaagcgttacttcgcgccattgccaacgacccgagaaacgttatacaagcattgcgttattgagcaatgatccggctaacgtagattgctagccggtataccagagaacttattccccttccccgggaacaggaacgggttgatggaactgcgggcgaagccctcctgttccatgcgcgcgtccagcaccagcgaggcgaggtcgtcggccactgcttctactttcgggtctttttcctgatagagaatcttcaggtaagtcccgcaatcgccgcagctttcggctttcaccgcagcctgctcattttccagcgaccagtagtgtaagtcgcggctctgttcgcagttactgcattttacgcgcacgacatgccattcggtttcgcacaggttacagtgcagataacgcagcccctgcgtggtgccgatctgcaccatgctggagaccggcatcgaaccgcacaccgggcaatactggcgcgcttcaccgtattccgcgcgggctttgcctggaatcaagctggccatttgcgcccagtaaagggagagcgcggcccagataaagggggctttatcgctgctgacggaggcaaaatccgaggcaaacagcgcgctggccatctgctccagctcctgctctgaggctttctccaggttctcgatcaccgccagcgcggggccgctcatctcgggttttagctcggcaattaacgaatgcagcagtttttgccagtgcttatcacgcggcagcacgtggatatccagcggcggcttgccctggtcgttcgcttctttaatacgtgcggtcagatccatctccagcggatggtcgtacagcaccacttcctgcgcgtgcgcgataagcgcggcaaagcgcaggtaatcgcccagcgggttattttcagccagctcgcgcagacgttcggcgcggcggttgtagacgtttttgagtcgggggaacaataacggcggaatcatatccgccgtacgtttctcgctcgaccccagctcatcttgcgggattatgcgaatactcattcagtttctttttccgttgtcttgcggacttctcggtaccagcgcgggtgatgtttcttcgcccacgaccgggttacccagccttccaccatcgcggtaatggtgcctttcacccaaagggcggcgtagatatgcaccatgataaccacaattaacgctactgcggcaaaagaatgcaacattaacgcgaatcggatcaccgggattgagaaagcaggcgcaaagtacggacgccagataattaccccgctcaccagcagcagcaccaggaagataatcgccgcccagaatacgcatttctgaccgaagttataacgcccggtgtcacccacttcctcgttgacgacgatcttacgaatattcttcgcccaaaagatatcatcccgattgattagattgtggtgccaataacggaaaaacatgatgatgaacgaggcaaacataaccacgcccacaaacgggtgcagaattcgcgccagttgcggggtgcccaggatatgcatcaaccagttgaaggatgggaataaaaagcccagcccgctcaccgccgccagcacgaagcagaaagcgacgatccagtggttgatgcgttccggcgccgtatagcgcacgatggtgtcacgtcgtttcatttgcgcacctcgtctttctcttcatgcaggttgtcatcttcctcttccgcgcggttcgggccgacgccgacatagtggaagacgctggcggcaaaggtcgcggcaaaaccgaacgcggcgagcggtttccagacgcctttccagaacttaacggtttcgctgatttccgggttttccggcagaccgtgatacagattcggcttgtcggcatgatgcagcacgtacatgacatgcgtaccgcctactcccgccggatcgtacagacccgcgttgtcataaccacgggtttttagttccgccacacgctcgcccgccagcgttttcatatcctctttcgagccaaaatgaatggcgccggttggacaggtcttcacgcaggccggttcttgcccgacggtcacgcggtcaacgcacagcgtacatttatagacgcggttgtcttccgggttgaggcgcggcacgttgaacgggcagccagcgatacagtagccgcagccgatacactgctcggactggaagtcgacaataccgttagcgtactgaatgatcgccccttccgccggacaggccttcaggcagcctggatcggcgcagtgcatacagccatccttacggatcagccactccagtttgtcgttctgttccacttccgagaagcgcatcaccgtccaggatttcgcggttaagtccgccgggttgtcatacaccccgacgttattgcccacttcatcacggatgtcgttccactcggagcacgccacctgacacgctttacagccgatacaggtggtgacgtcgatgagtttcgccacctcttcctggtggtcccgcgcctggggcgcgggggtgaaaccgttagtggcggaacgacgaatgatgtcttgcgattgataagccataggtcgtctccgttacaccttttccacgttcacaaggaaggatttaaactccggcgtttgcgtgttcgcatcaccgacgaaaggcgttaacgtattggcgataaagccttttttcgccacgccttcgtagccccagtgaataggaataccgatggtatcgatatccttgccgtccgctttcagcgtgcgaatacgcttggtcaccaccgctttggctttgatatagccgcggttcgaggagaccttcacggtatcgccatgcgcgataccgagcttattcgccagcttctcgccaatttccacaaactgttccggctgggcgatagcgttaagcaacgcgtgcttggtccagtagtggaagtgctcggtcagacggtaagtagttccgacatacgggaacttatccgctttacccagcgcgtcggcatcgtctttaaagatacgggcggcagggttagagataacgttcgggtgcagcgggttagtgcccagcggcgtttcaaacggctcgtagtgttccgggaacggcccttccgccatcttatcgatagcaaacaggcgacccatcccttccggctgcatgataaacggtccgacgtcgctgccgggcgcggcggcgctgtagtccggaatatcccatccggcccattttccgccttcccatttcagtagctgacgtttcgggtcccagggattaccctgcggatcggcggaggcgcggttatagaggatgcggcggttaagcggccatgcccatgcccagcccagcgtgttgccgagaccagacgggtcggcgttatcacgacgcgccatcatgttgccttccggcgtccagctaccggcgaaaatccagcagccgctggacgtcgtaccgtcatcgcgcagttgcgcgaacgaactgagttgttggcctttcttcaccaccaccgcgccggttgccggatcgataagatcggccagcgctttaccgttactttccatcgccacttcttcagaggcgggttcgtatggtttggtgtagttccaggtcatattcagcacctgttccgggttggcgccgccctgttcagagtacatcttacgcaggcgtaagaagataccggcgaggatttcgccgtcggtcatggcaattcccggggcgtccgcgcccttccagtgccactgtaaccaacgaccggagttaacgatggaaccattttcctcggcaaaacaggtggaaggcagacggaacacttcggtctggatttttgcgggatcaacgtcgttcgactcaccgtggttttgccagaaggtggacgtttcggtgttgagcggatcgatagtcaccaggtacttcagtttggaaagcgatgcgaccactttgtttttgttcgggaatgaggccaccgggttaaagccctggcagatatagccgttgaccttgccctgtttcatcatctcgaagtactgcagtacatcgtaccctttgtcccacttcggtagccagtcgaagccccagctattttccgctgtcgctttatcaccaaagaaggccttcatcatcgagacgaagaatttcggatagttgccccagtagttgacctgatccttcaacaatggcttcggcgtattggcagccagataggtttgcaggtcggtctgtttttcgctcggcagcgtcagatagcccggcagactttgcgacagcagtcctaagtcggtcagtccctgaatgttggagtgaccgcgcagggcgttaacgccgccgcccgccatccccatgttaccgagcagaagctggatcatcgccatagtacggatgttctgcgcaccgatggaatgctgcgtccagcccagcgcgtacaggaacgacgctgttttatcttttgcgctggtttctgcaatgtactcgcacactttcaggaagtccgctttcggcgtaccgcagatattttctaccatgtccggcgtgtagcgtgagacatgctgtttcaacagattccagacacagcgcgggtgttgcagtgtcgtatcgtgtttggcaaaaccgttttcgtccagctcatagtgccaactggttttatcgtactgacgcttgtcggcgtcatagccagtgaacagaccatcatcgaagccaaaatcttcacgcacgatcaggctggcattggtataggcctcggtgtattcacggttgtatttttcgttggtcagcagatacagcatcacgcctgacaagaaggcaatgtcagtaccagagcgtattggcgcatagaaatcggccaccgacgcggtacgcgtaaagcgcggatcgatcacaatcagcttcgcgccgttgtgaattttggcttccatcgcccagcggaacccgaccgggtgagcttctgcggcgttaccgcccatcaccacgacgaggttggcgttcttgatgtcgacccagtggttggtcatcgcaccgcgaccaaatgttggagcaagacttgctaccgttggtccgtgtcagacacgcgcctggttgtcgaccgcgagcatacccagcgcgcgggagaatttttgcgttaaataacccgtctcgttactggatgcggaagcgcacagcatcccggtggtgagccagcggttaacggtaacgccttcggcgttctgcgcctgatagttggcgtcgcgatcttccttcatcagtttagcgatgcggtcaaacgcttcttcccaactgatttgttgccacttatctgaacccggcgcgcggtattgcgggaatttcaggcggctttcagagtggataaagtccaccagaccggcccctttcgggcacagcgcgccacggcttaccggatgatccgggtccccttcgatatggaaaatagatgctttggcgtttttcgcaccgtcgccgaggctgtacatcaacagcccgcagccaacggaacagtaggtgcaggtgttacgggtttcgcgggtgcgcagcagtttatattgccgtgtttccgctagcgctacgccgggcgcgaagcccagtgccgccgccgtggtgcctgccataccgccagcgcagatcttaaagaactgccttctgctgacctgcatggtttgctccttgtttcgacattgtcacttctctttcacatttctctatccgaaacgctcagggagtggttgttatttttctttgcggacgggcccgcaaaggttcagaattggataaattttcctccatccgggaggagttgtaacagaataccataatgttggtgtgtgtgttcttatatggttaaaagaaagtgaacaatatactgtctgaagaagtcctaaatgtgactgatttcacaacctcacgccagttgactctctggaaacgcgaggatttgcagtccccccaacttgatgatgttgccgaggaagtgccagtggcactggtgtataacggcatttcgcatgtcgttatgatggcctctccgaaagatctgacgcattttgcaatggggttttctctgtcggaagggatcattgacagcccgcgtgaaatctatggcatggacgttgtaccgtcctgtaacggacttgaagtgcagattgatctttccagccgtcgatttatggggctgaaagcgcgtcgtcgcgcgctggccggacgtaccggttgcggcgtatgtggcgtggaacagctcaatgacatcggtaagccggtgcaaccgctgccgtttagccaaacgtttaatctcggtaaccttgatcgcgcgttaaaacatctgaatgattttcaaccgacgggtaagctgacgggttgtacgcacgctgcggcatgggtcatgccgtcgggtgaactggcggggggccatgaagatgtcggacgccacgttgcgctggataaactgctcggccgccgcgctacggaaggtgaggaatggcggcaaggcgcggcgctggtttccagtcgcgcgagttacgaaatggtgcagaagtccgcgatgtgcggcgttgaaattctgtttgccgtctctgccgcaacgacgctggcggtcgaggtggctgaacgctgcaatctgacgctggtggggttctgtaagccgggtcgggcgacgatttatacccatccgcagcggttaatcgcagactaaaatagtaccctctacatttgcgtaaaatatatattttctcaattttacagcctctcttgataacggaatcacgtatagtggcgaggccatacaggttttaatcgtttttatgctggaccgcagcttattccagccattcacgaggcgcttgctacccggtaatacttcgaacgaaaaaagcgcccctggggcgctcttttggcagtcgctaacgacttatttgctcagtttagcggttatatgcacgcgatttgcagcgtgaaaagcttagaactcacgctcaagatgatagccattataggtgtcgatgagttcgttataagctttaaccacagcctcataagaaccatctaccatatcgccgctgccgctattgaggtagtcctgctcatgcgaggtatacgccacgttatcgcgcacgcgccgaatgcgttttttcaccttgccctggaatttttccagctcagaaataaagccagggaagctacgatgtttatctatatcaacgttgatcttctcgtttagcttctgagtatgctcttcaaaatcagcgagctgtttgcttactgccgccacatcaaaagaatcatcagctacagcgtcattaagcgtctcggcttcctgcatcgtcaaaagcgtatagtacttaatggatttaccttctttcttctcggtcgccttaatttcattagccgcatgctgcccactcataatggtaatctcggcgatatatttcttcgcaatgggatcaaactcatcgaactgttttataaacgttttatggaacgctttagcgccagcaaaggcatcatccttgaagttatcttgatcatagtatttattcatactattgattgtttcagctagtggcccagccgcattaataaatgccagagcagcactatccagagaggcaaacgccggctttaattcagccgccgccttgatgtctttccggcagtcctggataaatgcaggatacacaggaaccagcggagagggatcgtcttccttaccggtagggccggtgcggaaatcgtcgaatgtgttagcataacgatttacagcacggtaaatatctgcctggagattattataacaatcaatgtaaacattcagcttttggttaagaacatcgttcgcatctgcgctttccgctgatgtgggttgtgtattgctcgctgatgagtccgcactctgagctacaggttgttcgtccgcttttttttcatcacaagcgcttagcccggcagtcatcagcatagcgataataattgatgataacaaatcctttttcattagaataacctataaataatatcattgaaatttacagattcattttaatgaaaaaaaacaggtatgtgatttattcaacacaaaaaatacttaatgcatatttcattataattaacattatcaatatcaatgtgttcgttaaaataagagaaccccaacgtaaatatacaaaaggcaattaaatgaaaaggaatttattatcctcagcgataatcattgcgctaatgaccctgggcgcaacaggatgtgatgacaataatgttaaaaccgaggcgacgccggccgccagcagtcagcctgcgacgccagcgccttctcagacgccggaaacgcaatctggcgaaagtccagcgcagccctcagcagcgaagccagaaacggcaactcagcccccggtggcgaaaccagaaacgccagctcagccggaggttgacgctgaagaagtttatagtgaaaaaatggatgtctatatcgattgttttaataaacttcaattgcccgttcagcacagtctggcgcgttacgcggattgggtgaaagactttaaaaaaggtccgacagggaaagagagcctggtttatggcatttatggtattacggagtcttacataacgaattgccagaaagagatgaaacaggtggccgccttaacgccattacttgagcctattgatggcgttgccgttagctatattgatagcgccgccgcgctgggtaataccattaacgaaatggaaaaatattatacccaggaaaactataaagatgatgcctttgctaaaggtaaggcgctgcatcagacattactgaagaatatcgaggattttaaacccgtctcggaaaaatatcatgaggctattcaggaaataaatgacaggcggcaattgacacagttgaagagaatagaagaagcggaaggcaaaacatttaactattattctctggctgtcatgatttcggcaaagcagatcaacaaggttatttctgccgatacctttgatgccgaagcgatgatgaaaaaagtcgcggaactggaaacaatgattgcgcaattgaaagaagtgaatactgatggccgtaattcttctttcatcagctctgcggctgattatcagctacaagctaaaaaatatattcgtcgcatcagagacaatgttgagtattctgattttgaaaagaaacgggtgcaggaccctgcaacaggatggatggttgcggattcttatccggcgtcgttgagaagttataacgagatggtggatgattataaccgcctgcgttgagtgacggcacattaactgcgcacaggctggcgcaagtgcctataaaattacgcgataacgccaataaaaagcgccgatcaggcgcttttttcgttcatgtattcttcatcaggcaatatccgtaaaaatagctgacgtaaacattaactaaagagagttattagaaaaaccagtaatctgaagctatcacaagatgttgacgtcacgctggaaggtactggtagtgtcattgaggatcggcatttatatggaaagcatttatccccctgatgcgaaaattctgagctacttcagcatagggcggcccagccttcatcacttatagggtgtcacgtccaactgttctgtaagacgttaattaatacctgccagccgcaacagtgctgtcactaccgcagcggcgataatcaccacaataagcggcattttacgccaggctaaaaatacggcgaagccaaccccaagaacgcgcgccattccggcaaaatgttcgccttcgtaaaaggtggtcgccagcgcgacggagaatagcagcaccgttgccgcatccgagagcagcgcctgtgaacgctcagacagcgccagacggctgccaagtttcgcgccgccgaggcgcatcaaataggttcccgcagacaaaagagcaataccgataataaatagcgtcatattgcccattattttttcctcgccagtaggccaagcagcgaaagcaacaccggcaatccggcagccacaaaaggaacggcggcaagcgacagcgcggcgccgctgcaaccacgaatcaatgtggtgcggtttttaaacgccgggatcaccagcgccagtaagattgccgggaatacggcatccagaccgatggtttctggggccggaagcagtttgccgacaccagcgccaatcagtgtgccaatcggccagaatagggcgacgcccagaccgcatagccagtaggcggctttacgttgttcgggtgttttttgcgacaggccgaacaccacgctctcatcattcataatatggcagccgaaaaagctggcggcgcgggtgccaaccaaatcgcgcaccgttacgccaaacggcacgtggcgcgcattcaccagcagtcctgccgccgccgccgctaacggattgccgccgctggcaacaatgccgataaacataaattcggacgcgcccgccagcacaaaaatagagaggacaaacggcacccacagtgggaaaccgtaggccatcgccagtgagccataggacatgccgacgacgcccacggccaggcacactaaaaatatcgcttttatcgtgtctcccttgagacaggaaaaatagtgtttcatcttctttagtcatatcgaacgaattttcattataatgaacggaacagatttgctttacaagacgaacatttcgttcgttatagtgaacgttggatgctttatgacacaacctattagcgtcattgccagaagtctggtacgcgaacgccagcgaaccggactgtcgctggcggagattgcgcggcgcgcaggcatcgctaaatctacgctttcacaactggaagcagggaacggcaaccccagcctggagacgttatggtcgctatgcgtcgcgctcgacattccctttgccaggctgctggagccgcaggtacaaaaaacgcaggtgattcgccgcggagaaggcaccaaagtggtggcggagcaggcgcattatcaggcgatattactggcggcgtgtccgcccggcgcgcggcgtgatatctatctgctgttgacgcagccgggggccgaccggatctctcatccgcatccgccggggtcggtggaacatattattgttacgcagggaaaagccctcgtcggcttaaccgaggcgccggaagagctggcggagggcgattacatttgttatcccggcgaccaggcgcatatctttaaagcgctggaaccggatactcaggctatcctggtagcggagcagaattgaaattgccggatggcggcgtaaccgccttatccggccgacaaaaaataaaaccgtaggcccggtaagcttgcgccatcgggcacacgacttactgcagatagaacacctcttttagctctgcgctgaccgggctgttatccggattcgcgggcataacgtcacgcatatgtttccaccaacgctggcaaacgtcggtgctggcaacggcgttccagcgctcctcggattcaatctcaacggtggcgaacagcagattgcgctcctgatcgagataaatcgcgtagtgatgcgcgccgtgagattttaatacggcttccagctccggccagattgggttatgacgacgctgatactcctcgtgcgcgtcggcatttacctgcatcacaaaggctttgcggatcataacgcctccaggtacagcccgcgaacttcatcgcggctggcggtgcgcgggttacacggcgcgcacgggtcggcgagggctttatccagccagccttcgatatcttcttttgtgacgcccagcttgctgaaaccttctggaatgccgacgcgtttgctcagcgtacggatagcgttaatcgcttcctgacttgcggcttcgtcagacataccgcgcgtctctacgcccatcgcctgtgcgatacgggcaaaacgcgcgacggcgttcggacggttaaagttctcgacaattggcagcaggatagcgttgcagacgccgtgcggcaggttgtgagttgcgcccggctggtgcgccagcgcgtgaaccagccccaaaccggcgctgttgaacgccatacccgccaggtactggccgaatgccatttgctcacgggcttcgaggttatggccatcgtcaaccgctttcggtagccacaaattgattaagcgaatcgcttccagcgcgttagcgtcggtaagcggatgcgcgccaacggagacataggcttccaccgcatgggtcagggcatccatgccggttgcggcggtcacagacgccgggatttccagcatgacgctggcgtcatccacggcaatatccgggatgatattcgggtcgatgatcacctctttgaccttacgggcagagtcgataatcaccgcgttgctggtcatctcggccgcggtacctgccgtagtattaatcgctaccagcggtacgccggcgtttttcactttgccgacgccggagtaggcggtggaagggccagggttggcggtgaggattttcaccgcttttgcggtatcgatcgggctgccgccgccgaaggcgataatgtagtcacattctgcgctctgatacgccgcaaaacctttctgcaccagctcttctgtcgggtttgggaacacctcatcaaacaggtggtaagacatttgatgttcatccagtgcgctaaacaggctatccagcaggcccagctttaccagttgaccatcggtaacgatcagcgctttgccccattgcttattcgccacgaggttcaccatatcggcaatcgctccagcgccatgcaggctaatttttggcagtgccaacataaagctcatcactattctccttaaaaaaattccctgttgcccgatggcgctacgcttatcgggcctacggtaaaatgcgcaccgtcctgtaggccggataaggcaaagccgcatccggcgttgagttgggaggtatcagtacagcgctacggcgctggccagcggtgtcacaccaaaacgtttgccgagtgcgaccagttcttcgcgcgtgatggtctgcttcataccgcccatcgaatagattttgactaatacctcagcggatttctctgcggtatctatcaaaccgaaggtttcatccagcgtaggtccgcttccgaacacgccgtggaacggccacagtaccagcgaatgtttctgcatttcttgcgcggtagcctggccgatttcatcggtgcctggcaccatccacggcagaatgccgacaccgtccgggaataccaccaggcattcggtgctgccttcccacagtttgcgggtgatcagcgcagtgttgttttccagtacgtaggtgagggcgatcaggttagtcgcatggcaatgcataatgacgcggtctttgccgtgggtggctttgatgcgttcgcagtgggagaggaaatgcgccgggagttcagaggtgggtaccgcgtcgtgggttaagccccacagaatgtggtagcctgcgccgtcactgtcgattttgaccacgcctaaattggctgccggatcgagctgcacgttgcggaagaatttgccggaaccggtaacgataaacggcgtattcgccagcagcggcatgggttgacttagcgcgatgtagcgcggtttttcgtggaaattagctgcaaacggtgcgatatcggcttcatccagacgcagcgtcaggttaccgccattacgttcgtcccaccctttcagccacgcatcagacgtggctttaatcatgccctggacgaaccaggaatcggtaatattttgcatgttcgtgttcccatttattgcccgaaggttattcgggtcttacgtaggccggataagcgcagcgccatccggcaatcgtgtttcatttattgccggatggcgacgcgggcgtcttatccggcctacagatcaggtgtcgctgtcagctacgtttgctcaggatctctttttcatagacgcgaacgctgtccagccactggctgccagccggcgtgtcgtgacgctggcaatacatttcccagacggcctgccacggcagagatttttgctcttccagcagcgccagacgcgcggtgtaatcgccgctggcctcaagctgacgcagttgatctgtgggttccagcagagcgcgcagcagcgcttttttcatgttgcgggtaccgataacccacgcggcgacacggttgatagaggcgtcgaagaaatccagaccgatatgcacacggtcgaacaggttatgacggacgatttcgctggcaattgcctgggtttcatcgtccaggagtaccacgtggtcgctatcccagcgtaccgggcggctgacgtgcagcagcagccgtggcacatagagcatggcggcggaaattttgtcggaaatcacttcagtgggatggaagtggcccgcatccaggcacagcgcggtctgacggctggtggcgtagcccatgtagaactcattggagccgacggtgtagctttccgcgccgatgccaaacagtttgctctcaacggcgtcgatgtggtgcgccgggtcgaatttctcgctaatgacctcatccagcgcttccagcaggcgctggcgcggggctaaacggtcgacggtaatgtctttcatgccgtccggaatccagatgttcatcaccgacggcgtaccgagctgctcaccaaagtatgccgagacgcggcggctggctttgcagtgatcgatccagaactggcgaattttcgcgtctggatgagagagggtaaaaccgtcagcgttcagtggatgagaaaaacaggtggggttgaaatccagccccagccggttcgctttcgcccactccacccagtttttaaaatgctccggtttgatctggtcgcgagcaaccggcgtatccgactcaaggtaaatggcgtgtaggttcagccgttttgggcctgggatcagacgcagcgcctgttccagatcggcgcgcagttcggtggcgttacgcgctttgcccggatagttgccggtcgattgaattccgcccgtcagcgaaccttccgggttctcgaatccggcaacatcgtcgccctgccagcagtgcatggaaaccggcaggcgatcgagctggcgcagcgcctcctcgacatcaatacctactgcggcgaaacgttgttttgccagttcccaggcttgttccagttgagtggtcatgcgcaaagctcctttgtctgtcgtttgggttgaaactgcgcaacgtggcgggcaatttcactatcaggattagggatataggttgtcaggtcgtagttagcgctgacgacctgacggaagtcatcgacgttgtttaattcgtcgagggtcataagctgaataccaatattgccaagggtggaggcttcaaccggcccggccatcacgcgaatgccacatgcatcggcgcacaactggttgagtagcgagttttggcatccgccgccgacaatatgcagttgggtaaatttttcgccgcgcagatttgcctgttcgtgcagaatgtcggcatacaacagcgccagactgtcgaaaatgcagcgcgccagttcggcatcgctgacgggaacgggctggtcggtctcgcgacaggctgcctggatttcagcgcgcatatcgtcaggattgataaagcgatcgtcattcgggttaatcaggaaacggcaggccggcagcgcttctgtttgggcgataagcgcaggcagatcggtaatgcgccgttctttcagcacacgctggagcagccacaaacccataatgtttttcagtacccgataacgcccttccgcgccgccttcgttggtgatattggcggccagcgcctcatcagtggtgtagggcattttgctttcaaaacccatcaatgaccaggtgcctgaagacaggtaagcgctatgtttatttgccagcggagaggcaataacggcgctggcggtatcgtggctggcgacggctaccaccggaatacggttgccctgcgggcaaatccagtcgccgataacattgccagggtgcgaggggcgaccgaaccagctctttttcgcgccagtccacgccagcagggtatcgtcccagtcatcggtattgatattgaccaactgggtggtcgtggcgttggtgtattcccagttcatttcaccggtcaggcggtagctgaaataatcgggcatcagcagcgcatgagcgacctgcgccgttaactcaggctgttgtttcgtcagcgcgcgtagctgatagatggtgttaaacggcagaaactgaatcccgctgcggcgatagatttcgcttttgccgatctggaccagcgcttgcggcatgatgcccgtggtacggttatcgcggtaggagaccggcaggccgacacgctgaccttgtttatccagcaggacataatcgacgccccaggtgtcgatgccgatgctgtcgataagaatgccttcattgcagactttcttcagaccaagacggatatccttttccagactgtcgatgtcccaggtgtcaaacccgtctgttttttgtaggcagttcacaaaacggtgaatttcacgtagcgtcagggtacggtgtttgctgtcgtaacgcgccagcatcacgcgcccgctggatgcgccgagatcaaccgcgacacaatggcgaaaagtcataatcaggtccttcttagagtcattgcgcacagtctaaaaaagccctcaaagacctaccttctcgttactgacaggaaaatgagccgctggcaacaaggcaaagatgaacgtgatagcgttcacagtttctactaataggccggtgtgatgtcgtccgcatttcccgctttttcccgccttttcttgaaaaaaagaccatgtttgcgcgctttagcgtcaaaaatttaaggtgaggccgataacccttaattactattcggacatgttgaattcaggaggaagcaaccatgaccgtactgcatagcgtggatttttttccatcaggtaaagcgcccgtggcgattgaacctcgtctgccgcaagccgctttccctgaacatcatcatgattttcatgaaatcgtgattgtggaacacggtacgggcattcatgtattcaacgggcagccgtataccatcagcggcggtaccgtgtgttttgttcgcgatcacgaccggcatttatatgaacataccgacaacctatgcctgacgaatgtactgtggcgttcaccggacgccttccagttcctggcggggttggatcaattgctgccgcaggagcaggatggttactatccttctcactggcgggtgaatcagagtgtgttgcagcaggtgcgccagttggtcggtctgatggagcgcgccggagacggcatggatgcgcctgccgtggcgaatcgcgaaattttgtttatgcaactactggtgttgttacgccgcagtagcctgatggaaggcgcgaccaataacgacgccaaactcaaccaactgatggcatggctggaagaccattttgcggaggaggtctgctgggaggcggtagctgaacagttttcgctgtcgctacgcacgctgcatcgtcagcttaaacagcataccgggctgacgccgcaacgttaccttaatcgcctgcgtttgatcaaagcccggcatttattgcgccatagcgatcatagcgtgacagaaatcgcgtaccgctgcggttttggcgacagtaaccacttttcgactctgtttcgccgagaatttaactggtcgccgcgggatatccgtcagggacgcgatgcgataatccagtaacgcgaacgctatcaacgttttcgtcgccaatatgctgataattataccctttaataccggatggcggctgcgccttacctggcctacggcggcgagcggtagacagaataagcgtagcgccatccggcaagcattcaacatgaggtgctgcggtggcaaatcagttaatccttttgaaaaaagatttttttactgatgagcagcaggccgttacggttgccgatcgctatccacaggatgtttttgcggaacatacgcatgagttttgtgaactggtgatggtctggcggggcaatggcctacacgttcttaatgagcgcccatacagaattacccgcggcgatctgttttacattcgtgctgaagacaaacactcctatacttccgttaacgatctggtgctgcaaaatattatttactgcccggagcgtttgaaactcaatgtaaactggcaggcgatgattcccggctttcagggagcgcagtggcatcctcactggcggctgggcagtatgggaatgaatcaggcgcggcaggtcattaaccagcttgaacatgagagtaatggacgcgatccgctggcgaatgagatggcggaattgctgtttagtcaactggtgatgacgttaaaacggcatcgctacgcgaccgacgatcttccggcaacctcccgagaaaccctgttggataaattaattaccgctttggctaatagccttgagtgtccctttgcgctggatgcgttttgccagcaggaacaatgcagcgaacgggtgctgcggcagcagtttcgcgcccaaaccgggatgacgattaatcaatatttacgccaggtccgtatttgccacgcgcagtatctgcttcagcatagcccgctgatgattagcgagatttcgatgcagtgcggttttgaagatagtaattatttttcagtggtgttcacgcgggaaaccgggatgacgccgagccaatggcgtcatctcagtaatcaaagcgattaactggccatgcctaaaccgacaatattcgccgcgataataattaccacgcagccgaggcttaatacagcaacgggacggcggccagcatttttccactcttttagcaccagaccgacaagccccccgcacagcacatagaagctcatgtgcagcatccagctcatgtagtcatattgcgctggaatgcgcgcgtgaccccaggcatagaaaaagaactgcaaataccacatcagaccgccaagcgcggacagcagaatattgctgataatcaacggtcttgccagcgagaagtcggcttttatcgacagattttgtacttttgccaggcggataaaacagaaaccgaggttcaccagcgcgccgccgcccataatcaccacgtaactcggcagcgcgacatagagcgggtcaacgccaagcgcggcagcagcttcatgcatcggtttcgcggcgttcatggcaaaagacattcccgccgagaaaataccgcacatcactgccagcagaagccctttcttcagattgaactcctccgctttaatgcccattttgcgttcttttaactgtccggcgcgcgtcacaatcccgacgccgatcagcgcgacaaaaacgccaagtagcgtcatgcgtcccccttcggtatgaattaacacatcgaagttaccgttgatgataggcgtcatcagcgtgccgacgataagcgtaatgccgatagcgatgccgatacccatcgacatgccgagataacgcatggtcaggccgtagttaatattgccgatgccccacatggcgccgaacagaaaaaccggtaaaagggtggagaggttaaactgcccataataggcccagaaatcaggcagtaacagagcgctaattgtccacggcagaataagccatgagacgatgccgcccactgaccacatggtttcccatgaccactgtttcacttgcttgaacggggcatagaagcaggctgcactggccgcccctatcaaatgccagaaaatacccatcgtaatcgcgttactcatgacatgttcctcattattttttatggacgggataccccttccgtttgcatgagtttaaaaattacgcagcctggtaaccttataacgattgccgccgttgggtgtattctggcaatcagcacgttaatgaagtgattaacttcacgttttaaaaaagtcggagcgcatcgtgaccgtctggatgttatttaaatcagtgggtaatatttgttttctaaaataccttcatcataacgacacgaaacgacttagctggcaacaatgcgaagaaaacgctgcgtgaggtcacataatgggaatagtctgacttaccgtttgataaaagggtagttatacagtaattatttggttgttttatttgtatttacaatttaaatatattgaaattaacgttaggaatcaattaaatataaatataaggaaatccctatattggcgttgttgatggtgttttgatttttattttatatgacgaatatgaatttcatttattttattttgctttttgaacattatcccaattttaaattaaagatctttgtctatattgtcgccattcacattgcgtattatggttgtaacggtctgacatgaaacaacgttttaattttaaattaaatggattctgttatgagaaaatctcttttcttactattacctcttgttgtaacaaatgcgcatgcagtatatgtcgatgttcgtcatgaatatcttgatgacagtaaagctaactatgaccgtgcgtatatttctcatcggtttgcgaatggtgttggttttgcgatagaagctatctcaaaatcaggcggggatgacaccaataaagcgtttaatgacctagaaacacagggcaacgaatatacgataagctaccaatttaaaaccggtgatgtcgcctggcaaccgggtttcgtgctggaaacaggcaacggttactctacctataagccttacttccgcgcgacgtggacattaaatgaaagctggtgggttggcgcgcgctatcgttttgaatatgtacgccgttcttctgatatccgtgatgatgataccatcaatcgtatggatgtctgggcgggttataaatggaacaactttgactggacaatcgaaggaatttataagaaagccgataaatatgatctttacgatggcggcaaagataactatgaatataacttcagaactgcctatattattgaccaatggtcgccattcgttgaggtaggtaatgtttccgtcaatagcaacagcgatgaaagacaaacccgtttccgcgtgggtataggctacacattctaatcattatccctgtttattatttattcccttttccggctactttataggtagccggttttttttacctggtgatgacctgcggataattattatcgcgcgttggccggataagacgcgaatcgccatccggcaacgagatgtgcaggaaactatgcgcttacatgatgcccagtagacggggtaagaacagtgtgatttccggaatgtaggtaattaataacagaacgccgataatcgcgccgtaaaaaggcagcaacggtttaatcacttcctcaactttgaccttaccgacgctcgccccgacatataaaccactgccaactggcggcgtaatggtgccaatcgccaggttatagatcatgataatgccgaaatgcaccggatcgacgcccagtttagccatgattggcagcagaatcggggtaaaaatcagaatggccggaccaatatccataaatgcgccgataatcaacaaaaagacggtaatgactaacaggataaccagtttattggcggaaataccgaggatcatatcgctcagcgccgcaggaatattggtgatcgacatcgagaaggacatcgccgaagaggttgccagcaggaacatgatgaccccggtcattaccactgtctggagcaaaatcgaaggcaaatccttaattttcagcgtgcggtaaaacaccatcgtcagcaataacgtatacaccacggcaatcgcggaggcttcaatggcggtgaaaatcccctgcacaatgccgccgacaataatcacgatcagcagcaggctgggaatggcctcaacggcaacttttagcgccatacctttttggacggtgaagaaaacccgataatttcgacgcttagcgaccaccagcgtgaccagcatacagccaacgccccacagcactcccgcgaccagaccgccggcgaacagagcggcaatcgatgttcccccgcttgccagcgcgtaaaggataaaagccgtggtgggcggaattaacattcccgtcggcgcggaggcgatattcaccgcggccgcaaagccgcgatcgtaaccttcgcgcgcgctcatcggcaccatcacgccgccgatggaggttgaggcggcaatcgccgatccggaaattgcaccgaacatcatattgccgacgatgttggtataagagagcgagccgggcagtttgccagtaaacagtttggcaaaattgaccagccgggcggcaattcccccgctattcatgatcaccccggacaaaacgaagaacggcacggccagcaaggcaaaactgtccaggctggagaacattttttgcgcggtggcgaacatcgaaatatcgaaaggcagtaccagcatcatggtgctgaaagaggcgataacgatgcagatcccgataggcgcgcccatggccagtaaaacaacaaagacggcaattagcgtacaggacgcaaaaatagggtcaatcatgtgatttctccagagtgtgctcagtggtatccgtggcggaatggatagctttcagggcgtcaacgatattcagcagcccatagaggatgatcagtacgcccgcgcaggggagatttgcagcatagaaatcgcagaaatctttaagccgccgataatcaatacccaaatggaaaacgcgataaaaatgacctgcaggataatatcccaccagccgcgaatcgtcggcgacaccttatccagtaagagagtcaggctaatatgctgtttctgaccggcgacaaaagccatgcccagcattgatacccacaccaggagaaatcgcagcatctcttcggtaagggtgctgggaacgcccagaatgtagcggctcaccacctgccagcaggcgatgccaaccattatcgccagcaccaggcaacagatagcgcccagcaataaatcaagtccttttctgaatgtgttcatcttaatttcctgattagattaattttttgctgtctggatacgttgatacagcccgtaaagccgcggtttgtttttcagaccgtcgtaaataggctgtactgcctcctggaagggttttttgtcgatctcgtagaattcaacgttgaaatcttttaccgccgccagcctggttttctctatttccttgtcccatgcggctttctcaaattcgatcgacgccttgatggcggcttcgacgatgcgctgctgttccggcgtcagcttttccagcgtgagggtactcattagcaggatatcgggaatgcgggtgtgcatatcgtaggtgtaataacgggcgacttcgccgtggcgggcgatggtgagagcgaactcattgttttccgcgccgtcgagaatgccttgttgtaatgaggtatagacctccgcctggctcatggcgataggcgaagcgcccagcagtttgagggtttggatcgccgtctcactctgcatgacgcggatctttttcccgcgtaaatcctcaatgcgtttaatcggcgctttgctcatataaaaattacgcgcgccggaatcataccagcctacgccgataaacccctgcgcggcggtggactgataaacaggctccatcacctgcgggttatccattacgcggtagtattcctcgacggtggcaaacaggtagggaagtgagaacacgccgtactcaggcgaaaaactctccatcagcccggacgacactttagtgatgtcgacgacgccgacctgcgtcaactccaccagttcgcgctcgccgccaagctgtccgtccgggaagtactgtactttgatatcgccgcccgttttctcttccacttgctgccccaggaagtgcaacgcatcttttaccggctggctattttcagcgtaggccaggcgcaaaatggtttcgccgtgggagaagaaagagagtgtggagagtaaggccaacgtagccagacgtataaaaccaggttgcttcatgattccctcgcaattgtaataatttaccgggaatgtaattgcagtgtgaaattataaccttcttgattttgccaccgctgacaaaatttggcaccaaaagaaagattttgaaaccctgtttcacatttcatgatttccaggaattcatcaacaggcggtttcggttggaggcgtaaaaaacggtttttttcagcggatgccgtaacgtttataaccctggaaaaagtacggcattgataatcattttcaatatcatttaattaactataatgaaccaactgcttacgcggcgttaacactgtgccgctcgacaataatggagatgattatgagttatacactgccatccctgccgtacgcttatgatgcactggaaccgcacttcgataagcagacgatggagattcaccacaccaaacaccatcaaacctatgtcaacaacgctaacgcggcgctggaaaacctgcctgagtttgccagcctgccggttgaagaactgattactaaactggaccaggtgccagcggacaaaaaaactgtgctgcgtaacaacgcgggcggccatgctaaccacagcctgttctggaaagggctgaaaaaaggcaccactctgcagggcgatctgaaagcggctatcgagcgtgacttcggttccgttgacaacttcaaagctgaattcgaaaaagcagcagcaacccgtttcggctccggctgggcgtggctggtgctgaaaggcgacaaactggctgtggtttctaccgcaaaccaggattccccgctgatgggtgaagccatttccggcgcttccggcttcccgatcctgggcctggacgtgtgggaacacgcttactacctgaaattccagaaccgccgcccggactacatcaaagagttctggaacgtggtgaactgggacgaagcagcagcgcgtttcgccgctaaaaaataatttgcattgcacgtctgtagaagcgagtctgatgactcgctttttttgtatccgcgtaaggagcagcagatgcattatccggttgacgtgtttattggcaaaattcgtgactatgacggcagccgcccgagcgctatcgccaaggtgcaaatcgacggcgaactcatgctgaccgagctcggtctggcaggcgatcagcaggccgaaaagaaaatccacggcggccccgaccgcgcgctatgccattacccccgcgaacactatgctgattggattcgccagttccccgagcaggcgacgctgttttgcgccccggcgtttggcgagaatctgtcgacgaacggaatgaccgaacacaacgtgtttattggcgacatctaccgctggggcgaggtgttgatccaggtcactcagccgcgctctccatgctttaaacttaatttccactttgccatcagcgacatggccctccttatgcagaacagcggaaaaaccggctggctgtatcgggtcattgcgccaggtaaggtctccagcgatgcgccgttggaactggcgtcgcgtctgagcgatgtctcggttcatgaagcgggtgttatcgcctggtctatgccgtttgatgacgaacaatatcaccggctgttgagcgccgccgggctgtcggcgagctggagccgcaccatgcagaagcgtcgtttgagcggcaaaattgaagatagcgccagacgactgtggggggataaaactccgccaaaatgaaaggaaggattatgactgaagctgaaaatgcggtggcgatcgtaaaagaatttttggtggcctcgatgattcccgatgctgaacgcgccgcaacgtatatgcacccggaggtgaaaattaccttcaccggaggccgggcaatggctggcgcggcagatatcgcgcagtttaacggcgctcgctacaagtgggtgaagaaggcgctgggcgagtttgatgcggtgcagcatgatcattacgttgtgatttattccaacggtacgctgtatggggaatggcccgacggtcgcccgtttgccggtaatcgctttatcgatcgtttcgaagtgcgcgatggcaaaattacccggatggacgtgtggaacgacagcgccgagtggattctggtgccggaaatctcccggtaaatctcgacggcgagataaaaaatcggcctgcattcgcaggccgatggtttttaggttcgcttgtacagcggtagccacagcgtaagccgcaacccacccagcgggctatcgtcagccttcacccagccgcggtgctgctgcatggcgctttcgacaatcgccagccccagcccggtgccgccagactcgcggtcgcgcgcctcatcagtgcgatagaacggacggaagatctgctcgcggtcttcagggctgacgcccggcccgtcgtcatcgaccgtgatcgtaataccgtctttatccaccgagaagccgacttcaatcttcgtatgtgaatagcgcagcgcattacgaactatattttccagcgcgctttccagcgcgtttgggttgccatagagcggccacggccccggcggataatttaccgttaacgacttgcccatctgttcggcttcaaaggcggcgttatccagcacttcgccccatagctgattggctttcatcgtttcgctgaccagcgcatttttctgttggttacgcgacatcaccagcaggtcattgatcatgctgtccagacgctgcgcttcggtttcaatacgctccagctctttgctttcgccgccacgacgacgcagcagcgcggtacccagttgcaggcgcgtaaggggcgttcgcagctcatgggagatgtctgacagcaaacgctgctgcgaggtcatcatccgttccagcgccgtcaccatctggttaaaactggcgccagcggcgaggaactcctgcggacccgcctccagctccggatgctgacgcaggttgccttgcgccacttcatcagccgcgtttttcaacttacgcgccggtttcgccagactccatgccagccatagcaagagcggcgaactgaccagcatcgtgacaatgagcaacagaagcgggcggtcaaacagcagattaataaaatcggattgcgaactgctggccggtcgaatcaagtaaagctggtaattatcctctccgtcgcgaacggagaacggccccaccatctctacgcggccatattttttcttctgcggatgatcggcgttatccgcctgaccaatgaagttacgaatgatctgcatttcgctgcgttcagcgccgatcacgcgtccttcagaggtcaccagtaataaccgctgtccaggcggcgcccacttatcgatcgcgcggaacaggcgacgccaccacatcaggtcgttgggcggatcgttcgcaagttcagcttctacatgttgctctatcatcaatccctggcgctgttcgctgtccagcagctcggtcatctggcgtgaatcgagcttgggcaacatcaggaccagcattagcaccagcgccagcgtcaaccagaagatggcgaagatgcgcgcggttaaacttcctatcatgaagcggaaaccatcagatagccgcgaccacgcaatgttttaaaccacgggtgaccgtctttgcgttccggcagtttgcggcgcaggttagaaatatgcatatcaatggcgcgatcgaacggcgtcaggcgcttacccagcacttcctgacttaaatgttcacgggaaaccacctggccgaggtgttgcgccagcaaatagagcagggtgaattccgtaccggtcagctccagcgtttggccatcgaaactggcttcctggcgacccggattaaggcttagcgcatcgacttccagcgtcggcgagccgttgtcgctgctctgctgctgttcgctccagtgggaacggcgcaaaatagccctgatgcgcgctaccagctcgcggtcgttaaatggtttgggtaaatagtcgtccgcgcccagctcaaggccgagaacgcgatccagctcgctgccgcgcgcggtcagcataatgacaggcgtctggtgtgtctggcgaagcgctttcaacgtatcgataccgtttttcttcggcatcatgacgtcaagcaaaagtaaatcgatgctgtcatccaaaagctcaagcgcctgctcgccgtcgtgggccaccaggacattaaaaccttccatttcgaggagctcttttaacagggaagtcagctctcggtcatcatcaactaacaggattttattcattgtttacgtacctccgaggcagaaattacgtcatcaggcgtcgctaatccatgactttacgttgttttacaccccctgacgcatgtttgcagcccgaatcgtaaactgtctctcgttgaatcgcgacagaaaagattttgggagcaagcgatgcgcaaagttaccgctgctgttatggcctcaacgctggcattcagttttttaagccacgcagctgaagttgttacaagcgataactggcaccccggtgacggggccacgcagcgtagcgcgcaaaatcatatgtttgacggcataagtttaaccgaacatcagcgtcagcagatgcgagatcttatgcaacaggcaaggcacgaacagcctcctgttaatgttagcgaaatggagacaatgcatcggcttgtcaccgcagaaaaatttgatgaaagcgctgtgcgcgctcaggcagaaaaaatggcgcaagagcaggttgcccgccaggtcgaaatggcccgcgtgcgtaaccagatgtatcgcctgttaacgccggagcagcaagcggttttgaatgaaaagcatcagcaacgaatggagcaactgcgcgacgtggcgcaatggcaaaaaagttcatcgttgaaattattgagtagtagcaactcacgttcccagtaacaaccctgttttccttgccatagacaccatccctgtcttcccccacatgatgtgggggttttttttatctccagtttgtcattctgttattagcttactgttttaaaccatccgttatactaccggcagaagatagcgggagtatttatgaatcaaacctatggacggctggttagccgggcggctatcgcggcaacggcgatggcatcagcgttacttttgatcaaaatttttgcgtggtggtatacgggatcggtgagtattctggcggcgttggtggactcgctggtggatattgccgcgtcattgacgaatttgttggtcgtgcgttattcgctgcaacccgcagatgatgaacacacgtttgggcacggtaaagcggagtcgctggcggcgctggcgcaaagtatgtttatttccggttcggcgttgtttctgtttttgaccagtattcagaatctgattaagccgacgccaatgaacgaccccggcgtggggattggcgttaccgtcatcgctctgatatgcactattatactggtcacgtttcagcgctgggtggtacgcaagacccaaagtcaggcggtacgggcggatatgcttcattatcagtctgatgttatgatgaacggagcgattcttatcgcgctggggttatcctggtacggttggcatcgtgcggatgccctgtttgcgttaggtatcggcatctatattttgtatagcgcgttacgtatggggtatgaggcggtgcagtcattattggatcgcgcgctgcccgatgcggaacgacaggaaattattgatatcgtgacgtcatggccgggagtcagcggcgcgcacgatctccgcacgcggcagtcagggccgactcgctttattcagattcatttggaaatggaagataatctgccgctcgttcaggcgcattttgtggctgaccaggtagagcaggcgattttacagcgttttccgggttcagatgtcattattcatcaggatccctgttcagtcgttcccagggaaggcaggaagttcgagcttgtataattgattgttaaaaagtgagccaggccagcattttgtgtataaattaccgccatttggcctgacctgaatcaattcagcaggaagggattgttatactatctgtatattcgttggatcgtttcgaagtgcgaaatcggcttccggcaatagatttcattttgcattccaaagttcagaggtagtcatgattaagaaaatcggtgtgttgacaagcggcggtgatgcgccgggcatgaacgcggcaatccgcggtgttgtgcgcgcagcgttgacggaagggctggaagtcatgggcatttatgacggctatctgggcctgtatgaagatcgtatggttcagcttgaccgttacagcgtatctgacatgatcaaccgtggcggtactttcctcggttctgcccgtttcccggaattccgtgacgaaaatattcgcgctgtcgcgatcgaaaacctgaaaaaacgcggtatcgatgcgctggtagttattggcggcgacggttcttatatgggtgcaaaacgtctgactgaaatgggcttcccgtgcatcggtctgccaggcactatcgataacgacatcaaaggcaccgactacactatcggctacttcactgctctcggcactgtagtggaagcgattgaccgtctgcgtgacacctcctcttctcaccagcgtatctctatcgttgaggtgatgggccgttattgcggcgacctgacgttggcggcggctattgctggcggctgtgagtttatcgtggtgccggaagttgaatttaatcgcgaggatctggtggcggaaatcaaagccgggatcgcgaaagggaaaaaacacgctatcgtcgctatcaccgaacatatgtgtgatgttgacgagctggcgcactttattgaaaaagaaacgggccgtgaaacgcgtgcgacggtgctcggccacattcagcgcggtggttccccggtaccttacgatcgcattctggcttcccgtatgggcgcgtatgctattgacctgctgctggaaggccatggcggtcgttgtgtcggtatccagaacgagcagcttgttcatcatgacatcatcgatgcgattgaaaacatgaagcgtccgttcaaaagcgactggatggagtgcgcgaaaaaactgtactgattgtttttgcgcgcctgatggcgctacgcttatcaggcctacaggttgcagaaacgtgtaggccggattaggcgttagccgccatccggcaatccctcagatttattcctcgaagttatagccaatctttttttattctttaatgtttggatctctttctggcacgctttgctcatcacaacacaacataagcgagtctggcgatgaaaaagtggggcgtgggattcacattattgctggcgtcaaccagcattctggcaaaggatattcagttacttaacgtatcgtacgatccaacgcgtgagctgtacgagcagtacaacaaagcgtttagcgcgcactggaagcaggaaaccggcgacaacgtcgtgatccgccaatcgcacggcggttcgggtaaacaggcgacttccgttattaacggcattgaagccgatgtcgtgacgctggcgctggcttacgatgtggacgctattgcggaacgtggtcgtatcgataaaaactggattaagcgtctgccggataactcagcaccttacacctccaccatcgttttcctggtccgtaaaggcaatccaaaacaaattcatgactggaacgatctgattaaacccggtgtgtcggtgattacgccaaacccgaaaagctctggcggcgcacgctggaactatctggcggcatggggctacgccctgcaccacaacaataacgatcaggccaaagcgcaggactttgtcaaagccctgtttaaaaacgttgaagtgctggactccggcgcgcgcggctcaaccaatactttcgttgaacgcggtatcggtgatgtgctgattgcctgggaaaacgaagcgctactggcgacgaatgaactgggtaaagataaattcgagatagtgaccccgagtgaatctattctcgcagagccgaccgtttccgtggtcgacaaagtggtggaaaagaaagacaccaaagcggtagcggaagcctacctgaagtatctctactcgccggaagggcaggagatagcagcgaaaaacttctaccgtccgcgcgatgctgacgtggcgaaaaaatacgacgatgcgtttccgaagctgaagctgttcaccattgacgaggtgtttggcggctgggcgaaggcgcaaaaagatcacttcgctaatggcggtacgttcgaccaaatcagcaaacgctaaaccgtttataaacccggtaacgtattatgttaccgggttttttctttgccacaattttgcgttactcttccccgtctatgggtcacagggaacgcatatcatgaaaaaaacaggctactttttactggcggtgatagtgattgtcgccgcggcgggcgtcggttactggaaattttccggcaaccctgatgcattacgggaaatcgtgcttgaacaatgcctgcccgatcagttacagcatcaaaacccagcgccgtgcgcggaagtcaaacctcgcgctggctatgtcgtctttaaagatcgtcacggtccgttgcaatatttattgatgcccacctaccgtatcaacggtacagaaagcccgctattgctggaacccgctacgcccaactttttctggctggcttggcaggctcgcggctatatgagtaaaaaatacgggcatgatattccggatagcgcggtctcgctggcgattaattcgcggcttggtcgttcacaggaccatttgcatatccatatttcttgcatccgtcctgacgttcgggaacaactggataacgatctcacgcgcatcagcactcgctggcttccgctgccgggtggcctgatggggcatgaatacctggcgcgccgggtaaccgagagcgaactggcgcagcgtagtccgtttatgatgctggcggaagaggtgccggaagcgcgcgatcatatgggacgctatgcgctggcggtggtacgccaaagcgacgactcttttgttctgctggcgaccgagcgtaatttactgaccttcaatcgcgcatcggcggaagagattcaggatcatagttgcgccattttgtcttcccgctgattttcgttacaccccctgttcattatcttattgattcttatcccggtttaaaaccggggtaagatcgtgtctataaaaatatgtgaaatcgatcaaaagatataaaggtatacctttatatcttttgatggttagttacactctcttcatagcctccatagattgtctggtggatggcttatataaaaacgtttttatttcatgtagtgacatcattaattgttcaccagatttgcgctgttaagcgtaaaggaatatcaacatgaaactttctatcgtggaaaaaatcggcttcggcgcgggagatatggcgataaacgttgtgattatcgccatgcagctgctcctcgcctatttctataccgatatctacggcctgagcgccgctgatgttggcgtactgtttgtggttgtgcggatgattgatgccattatcgatccggccatgggggttctgaccgataaactgaatacgcgctggggacgttaccgcccgtggctgctgtggtttgccattccttttggtttcgccgtgtatttgatgtttattacgcctgacatggcttatatggccaagctggcgtgggcctatggcacctatattcttatgaccctggtctataccgcgatcaccattccctatatttcgatgattggcgtgattaccagcgaccccgtcgaacggttaagcgccaacggttatcgctttgtgatgaccaagattgccgcttttctggtgactatcgtcgtaccgatgcttgccgtctggctggggcagggcaacaaggcgctgggttaccagttttcgatggggctgatgggggcgatgggcgccttgctgtttatcttctgttttcttaccacgcgtgaacgcagcgagccggaaattacgtcgttatcggtggggaaacagtttaaatatctgttacgcaacgatcagtggattattctcggcgttgttattctgctgctgatgtgcggttatgttattcgcggttccgttgccgcttattacgctaagtattatctgaacggcggcgatagcctgatttcacccttcctgactaccggcgtcgttgcctctattttagcgatgatcgctaccacctggataaccaagttctgggacaaaattaagatgttccgctacacccagattattacctttatcctgagcgcgctgatgtatttctccgtcgggcgtgaaaaccttgtcctggcgtttgccttctattttcttattaatttcttctgcgatatgcaaatgccggtgttctggtcctctatcgccgaagcggtggattacggagaaaagaaaaccggtctgcgcgtttccgggttggcgtttggcggcatcctcttcttccagaagtttgggatggggatcgcgggcgggatactcggattcctgctgagccactttggctatcaggccgatgttgaacagagcgcgcgttcgctcaccggtattgcgctgatgatgacgctcattccggctctgtttcaccttgcggttgggctgcttatgaaaaagtatctgattaataatgaatattatcgagatattcagcttgccctggcgcagaaacaggcataaggaggcgcaaatgaaggccatgaataaggtttgggttatcggcgatgcctccgttgatctggtgccggaaaaacagaacagctatctgaaatgccccggcggagcgtcggcgaacgtgggggtatgcgttgccaggctgggcggagagtgcggttttattggctgtcttggtgacgatgacgccggccgcttcctgcgccaggtttttcaggataacggcgtggatgtcacgtttctaaggctggatgcggacctgaccagcgcggtgctgatcgtcaacctgacggctgatggggagcgcagctttacctatctggtgcatccgggggctgatacctacgtttcgccgcaggacctgccgccgttcaggcagtacgaatggttttacttcagctcaattggcctcaccgacaggcccgctcgcgaggcgtgccttgagggagcgagacgcatgcgagaagccggtggctacgtgttattcgacgtcaacttacgcagcaaaatgtgggggaatactgatgaaatccctgaactgatcgcccggtccgccgcactggcttctatctgcaaagtctcggcagatgagctgtgccagctcagcggggccagtcactggcaggatgcgcgttattacctgcgcgatcttgggtgtgacaccacgatcatttcgctgggggccgatggcgcgctgttgattaccgccgagggggagttccattttcccgcaccacgcgtcgatgttgtcgataccacgggagccggtgatgcttttgtcggcggactgttgttcaccctttcccgcgcaaattgctgggatcatgccctgctggcggaagccatcagcaatgccaatgcctgcggcgctatggcggtgacggcaaaaggcgcaatgaccgctttaccgtttcctgaccaactcaacacttttctttccagccattcgctggcacaagccatgaccgtgaaataaggagtcatcatgcacgttgatcgaaacaaaatactgggatgcctggtgggcgccgccgccgcggacgcgatgggagccgcgacggaagtacgcacccagcagcaaataaaagactattttggcggctgggtgacgacctttcaaaaaccgccagcggacacgtttggccgctgcaacgaagcggggatgtgcacggatgattttattcaggcgaagtacatcatggatgcgctgctgcgccatcaacgccaggtcagcgacgaggcgatgcgcgaggctttccagcagtggctggattacccgtactacgccaactttaccggcccgacgacgcgtgcggcaatgaaggcaatattcaatgataaccgcgcctctttacagggtgagctggaaggcgagaaacagtcggtacagattattaataagggtaacgcggaggcaacgaacggcgccgccatgaagatttggccagcggcggtgctgcacccgggtgatattgacgcggcgattgaatgcgcgctacagatttgccgctttacccataataacgtgctggcgatgtccggcgcagcggcgatggcggcggcaaccagcgaggcgttaagagcgcagaccaatgcagacagcattattgccgccggtatttacggtgcgcaaaggggctatctgctggcgcaggagcaaggggcgatgatggtcgccgggccttccgttgcccgacgcattgagctggccgtagatatcggtaaacgtcatcgccattgggaaacggcggtggtggaacttgctgatattattggctccgggctgcacgtgagtgaagcggtgccggcggcctttggcctgttcgcgtgttgtccgaattctgccgtagatgctattatctccggcgttaatatcggcaatgatactgatactgtcgccaccatggtcggggcgatttccggcgcattccatggcgtggaggcttttcccgccgattatttaacgactttggatcgtatgaatcatttcgatttggcagaactggccaggcaaatcgcagggtagcgacttcaccctgccggggacggtaaaacgtcccctgctggcgaagacgtgaggtgcgcagcttgcaggttgataaaacgagctttactccgctttataagcaactattttttatcatctgtcagcagatccagaacgggtctttgcctttgggtagccaactaccgacgcaaaaagagattgccagatcctacaacgtctcgctgattgtggttaaacaggcctggagcgaattaatcaatgcgggcattatttcctcccagcgcggaagtggttcggtggtgtgctcggtgccggaaggcgtgagctacgggcacacgtttcgcggtattacccgcgatctccaggacgccagcgtggcgattgagaaccgtattctggaaatcgcgccgcgccgcgcgcgcgacgctcaggcagacggcttgagcctgcccgcacagcatcactatctctatatttcgcgtattcgttgcctgaataaccgcccatttaaccatgagaaaatatatctcgatctcagcttctttcccggcctggaactcacaccgcaggcgctggagcatacgtcgctttattcgttattaaacgtcacaagcgactcggcgatagaaaaagttgaggcgattttaccttccgctgacctgtgcgaaaaattgcaaatcgccgccaataaaccgctgttatccgtcgccagacagacgtttcaggccgggaaggacagcccttttgagtattgccgctattacgtgctgtctgaatactttggtgaaattcattatcactgatctgtccacttaatcctgcgataaccccaccatatctggcgtttacctgcctgactgtccgtcgtattcttgctgaaaaaatcgtcaggagacaggtatgtcgctctggttgtcccatcctctgttcctcccgtccatcatcgttggcgttactatccttctgtgggcgacttcgccactgccggagtttatgaccgcactgctattttttgctgtggcgatgggaccagggaaagttcctgcgcgggcggggatgctgtgatgtatcgcgctggcggtgatacgccaaagcgatggctcttttgtcctgctggcgaccgagcgtaatttactgatcttcaatcgcgcttctgccgaggaaattcaggatcatcagtgtgatatcttgaaccaacaggtcatcaaatgacagcttgatattgcattaacgaataccgtttggaggccggacaaggctctcgtggcgctatccggcaaaatctggcgatggcgcgggcgttaccaggccggtggatctgcggggtggctgtcattttccagatgcggcgatttaataaacacgcctttccagggtttatcgccgttattaatgagataatgcgcctccccaggttcgcactgtaaaacatctccagtttgcaggatatgaggtgttccttccagatacaggcacacttcaccgcttagggtataaaaaatctcacaagcggtattatggcgatggttagggaatgactgccctggttgtagtatgacgacgcccatatcgcagcccggcccacggattaagtatttagggccattatcgccaaagcggtattcatgattcttctcattcgttttttgcatgcttattctcctgttacaggcctggcgctttccagagggatgtcgttaagccaccatcgaccagcgcgcgttgatcctgataaacggcctgccatttttctctggcctgctgatagacagcgaaattttcaggattaggtttatgctcccgatcccagcgcactagcttttctcccgtttccgccagcgatggccagacacccacgccaacgcctgcggcaatagcgcaccctagcgcggtagcttctttgacgacaggtacgtgaacggtgagtcccgtaacgtcggcaaggatttggctccataatttgcctttagatcctccgccagcaaaaaccagcgagtcggcctgtacgccggaaaacgcggcaatttgctgtaaattgcaggcggaaacaatggcggcattctcttccagcgcgcgaaatagggtcgctttattacacttttcaggatcgatagacagattgataaacgacggcgcggcatggtaccagcgtttaaaacgcataacgtcagagaagatgggcatcacaccgtacgcgccgggaggcacccggctggccatatcttccagcagggaatacgcatcaatacctaacctttcagcgattagtttttcctcggcgcaaaaggcgtcgcggaaccaacgcatcgttaacccagtaaaaaagctaatagactcggtttgtaccataccggggatcacatgaggattgatgcgaacgttcatgtttgggtcggtgaccggcgcgggaagattgacgacctgttgccagaaggttccgcccagcacggccgtttgcgccgggcgtacgacgcccagccccagacagcctaactgcacatcgccgccgccaacgatgaccggcgtacccgcttgcaggtcgcactgttcagccgctttctgtgaaatgtgaccgagcagcgtcccggtttcttttaccggcgagagaatgtcagaacgcaggcccgccatctgtaacagactacgtttccagttgcgggtcaccagatccaataaccccgtcgtgcctgcgttggagggatcgaccgccagttcgccgctgagcataaaggccatccagtcgctgatcatagtgacggttgacgcgcgatgataaatatccggacgatggtgggcaagccagagcagacgcggaatagcgctgagcgccagcgtttgcccggagcaacgataaacttcctcctcaaaggtgttatcgtgcagctcttttaattcactgacttcgtgcgccgcgcgggcgtcaacattagcgcaggcccaaattggttcgccgttactgtcataaataacaatgccttcacgcatcgagcaggccgatacggcagcgatagccgttgcagggatggcggctttctgtagtgcctgacggatacactggcaagtcagttgccagtttttggcaagatcaaactccatcgaaccaggcacatccggcacggccagatgctgccattccgcttgaccgacagctatttgctttccttgtagatcaaaaattactgctctgacgctaccggtaccggcgtcaagagccatcaggtaatgtcctgattcagtatgggtacagagtcgagccatttttttatcctcggctatttttacatcgttacataaaatcctgtcagttattgtttattgaattgaggtaagtgttattttatttttttatttttcaataatttgaattattttccctgcggttttctgatcggtaaccagtgcattgatatagttaccgcgcatagcggcaataatagcttctgctttttgttcgccgccggcgacgccaatcacggttgggatcgtggaaagtgaatttaacttcaggccaattaattcgttatggattttgatgtctggaataatttcgccatgagcatcaaaaaaatagcccagaatatcgcctactgcgcctttgcggccaatcatgagttgttcaccctgagtgatataaccggattttaagatactggcttgatctttctggttaattgccccaatccccacgatggcggcatcggcagcttgcgctgtgagcatcacatcccgcacgctattttcattgcgcagcgtgcaggcaatttcctgcgatgatgcgcgcagcggcgcgggcataatacttacgctacaagcggcatcaagctggcctattccggtcatatacggccccacgccgccggataacgtgaccagtcggatttgttgcgccgagataaatccgctgaggcgttttaatgtggtcatcgtggcttcgccaaagccgacggccagcagttgctgtggccgcagtgactccatcaacatatgggcggcgccgattcctaagcgcagaccaatatcggcatcgggtaatgccggcagcacgcggatattctgcaatgcgaagtggttgcgcaaggcattttcatactcaagacacccttcgaagcgggagttgatttgtacgcgaataataccggactgatgccctttctccagcagacgagaaacctttagccgggttagccccagacgctcgctgatttcactctgcgtcaatccatcgtgatagtagaaccaggcaatacgcgccacctgctcttcttcgcacattccataatcagataccaacgtattatcgctcattgtcataacctggctttactttgaacatttctaaatcattaacacaattgttcagttatcactccgaaataaccgtgattaacgccacaaaaacgcgccaaatctgaacatttatcatctaaaaattcatttattcagaaaacgtgatctggatgagagttttttgaccaaataactactaccgttttgaacaatttctttttcaaaaaacatttgttcagtcccgtcagtcaacattgagggagcggaggcaacatgcaaatcagtcacaatactgcatcccctctgatttgtgtgcagaacatttataaaagttattccggcgtcgaagtactaaagggaattgactttactctgcatgcgggagaggtgcacgcattgcttggcggcaatggtgcgggtaaatcaacattaatgaagattattgccggtatagtcccgccagatggagggactatcgatattgctggtgtgcgttgcagtcatttaacgcctctgaaggcgcaccagtatggcatttacctggttccccaggagcctctgttatttccgagtttatctgtgcgggaaaatatcttgtttggcttgcagggacgtcaggcctccacggaaaaaatgcagcagctattaaaggcgatgggatgccaactcgatccggcgagcgctgcgggtacgcttgatgttgcagaccgccagatcgttgaaattatgcgcggcttgatgcgcgactcgcgaatcttaattcttgatgagcccacggcgtcgttaacgccagccgaaactgatcggttatttacgcgtctgcaagagttgctgaaaaagggtgtcggaattgtatttatttctcataagctaccagaaattagacagttagctcactgcgttagcgtgatgcgtgacggtaaaatcgcattattcggaaaaacgcatgacctttctaccgacgagattattcaagctatcaccccggcaacgcagggcgtcagtctttccgcgaatcaaaagttgtggctggaattgcctggcagccgcccgcagaacgaacgcggcgcgacagtattagcgctggagtcactgacgggcgaaggttttatgaatatcaaccttgaggtgcgggcaggcgaaatccttggtctggccgggttggtcggcgcgggacgcacagaactggctgaaacgctgtacggtattagaccggtcaatgcggggcggatgctgttcaatggtcaagaaattaacgccctgacaacccaacagcggttgcagctcggcctggtctatttgccggaagatcggcagtcatccgggctgtatcttgacgcttccctggcatggaatgtctgttcgctgacccacaaccaaaaaggattttggataaagccccagcgggataacgccacccttgaacgttaccaccgcgcgttaaatatcaaactcaataatgccgaacaggcggcgcgtactttatccggcggtaaccagcaaaaagtattgattgccaaatgcctggaggcctctccgcaattactgattgtcgatgaaccgacccgcggtgtcgatgtctccgcccgcagcgatatttatcagctgttgcgcagtatcgcgcaacaaaatgtcgcggtgctatttatttcctccgatctggaagagatagagcagatggccgatcgcgtatatgtcatgcaccagggggaactgggggggcctgcgttatgcggcgaggaaattaacgttgataccatcatgcacgttgcgtttggcgaacatggtgcgtcggaggcaacatgttgaaattcatccaaaataaccgggaagcgacggcactgctggcaatagtctgtttattcgtgtttcctggcgcgctggatagtcagtatttgagcgtgcaaacgctgacaatggttttcagtagcgcgcaaattttgatgctgttggcgattggcgcgacgatggtaatgctcacccgcaatattgatgtatcggtgggctcgacgacaggaatgtgcgcggtattgctgggagtgatgttaaacgccggctatagcctgccggtcgcctgcctggccacactaatattaggaattgtcgccggattttttaatggcgtactggttgcctggttgaagatacccgccattgtcgccactctgggaacgctgggcttgtatcgtgggatcatgctgctatggacaggggggaaatggattgaaggattacccgcaggcttaaagcaactctctgctccggtgtttctgggaatttccgcaatcggctggtttaccctggtgttagcgctgcttatggcctggctcctggcgaaaaccgcctttggccgcaatttttacgccaccggcgataacctgcagggcgcccggcaattgggtgtccgtaccgagatggtacgcatcatggcattttcacttaatggcggtatggcggcattggctggaatcgtgtttgcctcgcagattggcttcattcccaatcaaaccggcacggggctggaaatgaaagccatcgcggcctgcgtattggggggaattagcctgttaggcgggtcaggcacggtcatcggcgctattctcggcgcttattttcttacgcaaatcgatagtgtgttagtgctgctgcgtatccccgcctggtggaacgattttattgctggcctggtattgttgggcgtactggtattcgatgggcggctgcgttgcgcattacaacgcaatctgcgccgccagaaatatgcccgttttatatcaccacccactccactacagacggaagcaaaaacgcacgcacaacagaataaaaacaaagaggtggcatgatgaatccatggcgacgctatagctgggaaattgcgctggcagccttattgatctttgaaattctggctttcggtctgattaatccacgtttattagatattaatgtcttactttttagcactagcgattttatttgtatcggtattgtcgctttgccgctaacaatggttattgtcagcggtggtatggatatttcatttggttctacaatcgggctatgcgcgattaccctgggtgtgctgtttcagctcggtatgccgctacctttagcgattattattaccctactacttggcgcaatatgtgggctgataaatgccggacttattatttataccggcgtaaacccgttggtgattaccctgggaaccatgtatttatttggtggtagcgcattattgttatctggtatggctggcgccacgggttatgaaggtattggtggatttcccacagcgttcactgactttgccaatatttcatttcttggtattcccatgccgcttattttttttcttgtgtgctgtctgtttttctggctgctcatgcatcgtacgcatatgggacgcaacgttttcctgattggccagagcgcccgtgtcgcgcagtacagcgcgatcccggtgaatcgcacgttgtataccgtgtatgccatgaccggatgcgcctccgcgatcgccgccgtattactggtttcttactttggctccgcacgttcggatctgggcgcctctttcctgatgccggccattacggcggttgtgctgggaggcgccaatatttatggcggctccgggtcgattatggggtccgcgttggcggcgctgctggtgggatttttacagcaggggctacagatggccggagtgccgaatcaaatttccagcgcattgtccggtgcgcttctcattgttgttgtcgttggtcgttccgtcagtttgcatcgtcaccaaatccttgaatggtactcacgccgtcgcaatgcgcatcaggcatgatttccttttgaaatttatggagaaaaaaatggcaagacacagcattaaaatgatcgccttactcactgcgtttggtctggcatctgcggcaatgaccgtgcaggcggcagagcggattgcttttattcccaaactggttggcgtgggcttttttaccagcggcggcaatggcgcgcaggaagcgggaaaagcgctgggcattgacgtaacttacgatggccctacagagcccagcgtctcaggccaggttcaactggtgaataactttgtcaatcaggggtatgacgccattatcgtttctgccgtttcgcctgatggcctgtgcccggcgttgaagcgggcaatgcaaagaggcgtgaaaatattaacctgggattccgataccaagccggagtgccgttcttactatatcaatcaagggacgccaaaacagctcggcagcatgctggtagagatggccgctcatcaggtggacaaagagaaagcgaaagtcgctttcttctattccagcccaacggtgaccgaccagaaccagtgggtgaaagaagctaaagccaaaattagccaggaacatccggggtgggagatagtcactacccagtttggctataacgatgccacgaaatcgctccagacggcggaaggtatcatcaaagcgtatcccgatctggatgccatcatcgcgcctgacgctaacgctttacctgctgcggcacaggcggcggagaaccttaaacgcaataatctcgcgattgttggttttagtacgccgaatgtaatgcgcccttatgttcagcgcggcactgttaaagagtttggcctgtgggatgtcgtccaacagggaaaaatttccgtatatgtcgccaatgcgttgctgaaaaatatgccaatgaatgtcggtgattcactggatattcccggcatcggcaaagtcaccgtttcacctaatagtgagcagggatatcactatgaggcaaaaggtaacggcattgtgttattgccggagcgtgtcattttcaacaaagacaatatcgacaaatatgatttctgataactgttatgtatcgacggagtaaagaatggctgatttagatgatattaaagatggcaaagattttcacaccgataaaccacaaactaacactttgttcgcattaaaaggctgtggcgcgctggattggggaatgcagtccagactggcgaggatttttaatcccaagaccagaaaaacggtcatgctggcctttgaccatggatatttccaggggccgacaaccggacttgagcgtattgatatcaatattgcgccgctctttgaatatgctgatgtcttaatgtgtactcgcggcatattacgcagtgtggtacctccggcaatcaataaaccagtcgttttacgcgcgtccggggcgaattctattctcactgaattaagcaatgaggcggttgcggtggcgatggatgacgctgtgcggttgaatagctgtgctgctgccgcacaggtttatattggtagtgagcatgaacatcagtcgattaaaaatattattcaactgattgatgccgggttacgcgtcgggatgccaataatggcagtgaccggggtgggtaaagatatggctcgcgaccagcgttatttttcactggcaacgcgtatcgctgcggaaatgggggcgcaaattatcaaaacgtattatgtcgataaaggttttgagcgtattgcggcaggttgtccggtgccgattgtcatcgccggcggtaaaaaactgcctgaacgtgaagcattggaaatgtgctatcaggcgattgaccagggggcttctggcgtagatatggggcgtaatatattccagtcagaagatccggtagccatgattaaagcggtacatgctgtcgttcatcataacgaaacagcagagcgtgcttatgagctgtttttgagtgagaaaagttaaatgagatcgcttccccatcttttaccgatgcgaggagatggggatgactgttattttatttggaataatcagggggttaatgatgcacgttacgctggttgaaattaacgttcatgatgacaaggttgaacaatttatcgatgtttttcggcagaatcatctgggctcaattaaagagccgggtaacttgcgttttgatgttctgcaggatccgcaggtgcttacgcgattttatatttatgaagcctacgttgatgaacaggccgtcgcttttcacaagacaacgccacactacaaaacttgcgtggagcagcttgaaccgttgatgaccggtccgcggacaaaaaagtttttatgggtttgatgccttaaggagcgctcatgaacagccagtttgccggattaacgcgcgaagcatgtgtggcattgttagcgtcatatccgcttagtgtgggtattctggcagggcagtggattgcgttgcatcgctatctgcaacagttggaagcgctaaaccagccgctgttgcatttggatttgatggatggtcaattttgcccgcagtttaccgttgggccatgggcagttgggcaactgccgcaaacctttatcaaagatgttcatttgatggtagcggatcaatggacggcggcgcaagcctgcgtgaaggcgggcgcacactgcatcacgcttcaggctgaaggcgatattcatctgcatcatacgctaagctggcttggtcagcagaccgtgcccgttattggcggtgaaatgccggtgatccgggggattagtttatgcccggcaacgcctctggatgtcattatccccattctgagcgacgttgaggttattcaactactggcagtaaaccctggatacggcagtaaaatgcgctccagtgatttgcacgagcgcgtggcgcagcttctctgtctacttggtgataaacgcgaaggtaaaattatcgttattgatgggtcgttaacgcaggatcagttgccttcgctgattgcacagggcatcgatcgtgttgtttctggtagtgcgttatttcgtgatgatcggctggttgagaatacgcggagctggagggcgatgtttaaggttgccggggatactactttcttaccctccacagcataaatgccggatggcggctttaccttatcaggcctacataagcactcggctggtaggcctgataagcgcagcgccatcagacattgattggcaattaagcctgtttagcagcttctgctgctttcacgatcaccgcgaaggcgtcagctttcagagaagcgccgcctaccagtgcgccgtcgatgtccggctgcgcgaacagttcggcggcgttggaggcattaacagaaccgccgtactggataataacctgttcagcgattttcgcgtcagctttagcaatgtggtcacggatgaatttgtgcactgcctgcgcctgcgcaggagttgcagatttaccggtaccgatcgcccatacgggttcgtaagcgataaccgcgccttcaaaggctgccgcgccctgcgttttcagtaccgcgtcgatctggcgtgcgcatacttcttctgttttgcccgcttcgttttccgcttcggtttcaccgatgcacagtaccggcgtcagaccttgttctttcagtacggcgaattttttggcgatcagctcgtcagattctttgtgataagtacgacgctcggagtggccgataataatgtactgcgcgccgatatccttcagcatttcagccgaagtttcaccggtgaatgcgccagacagattcagatcaacgttctgcgcgcccagcatgatgtggctgccggcagcagcgcgtttcgccagatcgatatacatttccggcggagcgattgccacgtcgcagcctgctacgcccgtcagttctttacgcaggttagccaccagttcgtttaccatgtggcggctgccgttcagtttccagttacccatcactaaaggatgtcgcatttcatttctccacgcttagtcagcgaattaaggaagatggccgctcgtcagagcagcatggtctgtgaaacagtatagagattcatccccggaaaggctttgctttttgtcatcaattcgccccttccagattttcagataacgtcagcttaatcggttcaaccgcgaaggtcagccccttttcgccgttatctgcgacaacataacgtaccgcgccttcggtctcggcgtaatagtgtttacctttaccggcgataagcatcttttgcagttttttctggctttgctcttttgtcagtaacggggcgacagtgcgaataatggcggccatatattccagcgctttcgctttcgccgctttctgttccggcccctgaatgggcagccaggtaatctgcatacttttcactttgagcgtaccgcgctccagcgccgtggaggcatacagattttcgttaatcttactggcggcgcgggtcagattcgccttatcgcggctattctcaatggcgcgaaattcattgagcggcagatcgggattctggcggttaaagttctcacgaaactggctaatagaaagatcaaaggttggcgagcccgccagcagatagggcgctgtcgtggtcgatgaagagagctgcgcgtgcgccgttatgctggcggtgagagcagaaaacaacagtaaaaacagagtacatcctggcttcatcaatcttacctttcgttaggactgctcacgattaaaacgataactgtcgggcttgtcaaaagggtaaactgtagcggaaggcaaaatataaggaacttacatgaccatacagcaatggttattctcatttaaagggcgtatcggacgccgtgatttctggatttggatcggcctctggtttgccgggatgctggcgctattttcgctggcggggaaaaacctgcttgatatccaaacggcggcattttgcctggtgtgcctgctgtggccgaccgccgccgtcatggtcaaacgtctgcatgaccggggacgttccggcgcgtgggcgttgctgatgattctggcgtggatgctgctggccggaaactgggtgatgctgccggggatgtggcagtgggtcgtcgggcgatttattccgacgctgatcctggtgatgatgcttatcgatctgggcgcgtttgtcggtgttcagggggaaaataagtttgggaaagcgacacaggacgtgaagtttaaagcagaaccgtaaacgggcggtaaaccgtaatttgcccggtggcgctgacgcttaccgggcctacagattggtgatgatttgcaggccggataagccccagccgccattcggtaaaacatcaccagtaatgttcagccgtcatatgccccggtcggcggcgcagatgtttagtcatctgtcgggtctctttcagcagttgctgcgtatcgcgcaccatctgcgggttcccgcacagcataacgtggctggtctctttatccatcggcaatccaacggctttttccagctcgccgttttcaatgagcgctggcacgcgtccagtaagcgagcctggcacgttctcccggctgaccaccgtttggatgcgcagcttgccttcataacgctgttgcagttccagcattagcggcagatagcttaaatcggcggcgaagcgtgcggcgtggactaagaccagatttttaaagcgtgcgacatcctggccatattgtagaatagacaaatacgggccaatagcggttccggtcgccagcatccatagcgtctcgcagtcaggcacttcatccagtacaaagaaacccgacgcgtcgctgaccacttgcacctcatcgccaggttttagcgccgccagccgcgggctgagctttccttgcggcaccgtcaccagataaaactctaaattcggattgtcaggcgcattgacataggaatacgcgcgctgaacgcgctcgccatcgatctccagtccgagtttggtaaattggcctgcagtaaaaggattaatgggggcgtgaacggtcaggctgaacagtgcgtcagtccagttttgcaccttagtgactttacctgttacccaatcggccatggttttctcctgttctgaatcgctaaccttatcttcgttcgtcaggagaaagatttccagccccgcgaggctggaaggctctaactaacaaatgcgctagagaatatgcgcctgcacatccggatctttacgatcaagatagtggatagactgaatgcggcggatggtgcgtgatttgccgcggatcagcagcgtttccgtcgtggcaatatggcctttccggctaattccttccagtagatcgcctttcgtgatgccggtcgcggagaaaataacgttatcgctacgcgccatgtcgcccaggcataacgccttgcccgcttcaatgcccattgctttgcagcgcgccagttcctgttcgccaatgcggcggttttcttcgctgttgcctttcacgtcatggcgcgccagcagacgcccctgcatatcgccgtccagcgcgcggatcaccgctgcggataccacgccttctggtgcgccgccaatcccgtacagcacgtcgacttcgctatccggcatacaggtcagaatggaggccgcgacgtcgccgtcaggaatggcaaacacgcgtacgcccagtttggccatctctgcgatgacctcgtcatgacgcggttttgccagaatggtcacggtcaaatcgccaagcggtttacccagcgcatccgcgatgttgcgcaggttatccgccagcggcagattgagatcaattgcccctttggcgcccggaccgacaatcagtttttccatatacatatcgggcgcattcaggaaacagcctttatcgccgaccgccagcaccgccagcgcgttcgcctgacccatcgccgtcatgcgcgtgccctcaatcggatcgacggcgatatctaccgcatcgccgtggccggtaccgactttctcgccgatatagagcatcggggcttcgtcgatttcgccttcgccaatcacgatggtgccgtcaatgttgacctggttgagcatgatacgcatggcgttgaccgccgcgccgtccgcggtatttttatcgccgcgtcccagccatttgtagccagccagcgccgccgcttcggtcacacgggaaaattcgatggcaagttctcgtctcataacaaactcgtagcaaaaaggagtggcgcgcagtgtagcacaggggaaggagggaataattgatgtgtgtgcggagttgcctccgcacaaagattttgccggatggcgaccttacttgtcgtgctcttcccacgccattgcgcgtttaaccgctttcttccagccgctgtaacggtagttacgctcggtggtttcaatgccggggcggaattctcgctcaatgacggctttttcctgcagctcgtccaggttctgccagtaaccgacggccaggccagccagataggcggcgcccagcgcggtcacttcgcgcacttccgggcgttccacccgcgtgccgagaatatctgactggaactgcatcaggaagttgttggccactgcgccgccgtccacacgcagagcgtgcaggcggataccggagtcggcctgcatcgcttccagtacgtcgcgggtctggtaagcgatggattcgagcgtcgcgcggataatgtgattagagttcacgccgcgggtcaggccaaaaatggcgccgcgggcatacgggtcccagtacggcgcgcccagaccggtgaaggccggaaccacgtagacaccgttggtatctttcactttcgtggcgaaatattcggagtcgaacgcgtcgctgatgagcttcatttcatcacgcagccattgaatggacgctcccgccataaacaccgcgccttccagcgcatagttgacttcgccgcttgggccgcaggcgatggtggtcagcaggccgttttccgattttaccgctttctcgccggtgttcatcagcataaagcagccggtgccgtaggtattctttgccattccttcctttacgcacagttgaccgaataacgcggcctgctgatccccggcaatcccggcgataggaatacgtgtaccgcctttaccgccaatattggtctggccgtagacttcggaggacttacgtacctggggcagcatcgcgcgtgggatatccagcacgtccagcatcttatcgtcccagtccaaatcatggatgttgaacagcatggttcgtgaggcgttggtgtaatccgtaacgtggacgcggccctgcgtcatcttccagataagccaggtatccaccgtaccgaacagcagctcgccacgcttcgcgcgttcgcgcgaaccttccacatggtcaaggatccatttcactttagtgccagagaagtacgggtcgacgaccagaccggtattgtcgcggatgtaatcttccaggccgtcgcgtttaagctgttcgcaaatatcggcggtacgacggcactgccagacaatagcgttgtatatcggtttgccggtttcacgttcccagacgatcgcggtttcacgttggttggtgataccgatagcggcaatctgatcggaactgatatcggccttagccagcacttctaccagcgttgagctttgggacgcccaaatttccatcgggtcgtgttctacccagcctggcttaggataaatttgctcaaattcacgctgtgatacgctgacgatattcgcgtcatgatccataacgaccgcgcgggagctggtggtaccctggtcgagcgcaacgatatattttttttcagtcataattttgtcccgtaatcagattacagcgaagcattttgttgtgtggtcgcggtggagtccttctcttccacgacgcaggtatcgcacggcaaatgacggccaataaatttgcgataagcaaacgcgcccagaatggcgccgacgatggggccaaacagcggcaccaggaagtaaggaatgtctctaccgccggtaaacgcaatttcaccccagccggcaagcccggcgaacattttggggccaaagtcacgcgccggattcatcgcaaacccggtcaacggccccatagaggcaccgataacggcgatcagtaaaccaatgagcagtggcgcaagcggaccgcgaggtacgccgtttccgtcgtcggtcagcgccagaatcagccccatcagaatagcggtaatcaccatttcaaccgcgaaggcctgcacaaaattgatatgaggattcgggtaagttgagaaaatgcctgcgagatcgagactttcaacgctgccacggacgatatggtgggtttgttcgaagtccacaaaaagattgtaataaagcccgtaaactaacgccgctgcgcaaaaggcgccggcaacttgagaaataataaaaggaacaactttacgtttgtcgaaacaggcaaatagccagagtgcgatggtcactgccgggttcaggtgtgcgccagaaacacctgccgtcaggtagatagccatcgctacccccagaccccagatgacgctgatttcccactgtccaaaagtagctccggcaactttaagcgcagcgacacaacccacaccgaaaaaaatcaacaacccggtaccgaggaattcagcaatgcactggccttttaaggttgatgtttgactcataatcggatcctgaagagtatgtaatgattattggtatgcgaggaggtcatggacatccacgatgccctgtaggcacactgttaatttatcgttaacgagcaaaaacgagaaatatcgaaatcaaaatgtgtgtactgcgtcaataaaatgagcgttatcgcgccatgaagcgcattttgagacagcagaagagagtgaattgaatcatttcattaaccaatatgttaacacttttaagttattgaatgaatgttaccaggagatggatgaaaattgctgcaaaccgcgatctacgcggtatgtcgctggacagcgagagcggggcttcatacaatcgacactatatattgtgcgcgtttacgtgaagcgtcgccttgcaattcaggagaggtaagatcatgtctttagaagtgtttgagaaactggaagcaaaagtacagcaggcgattgacaccatcaccctgttacagatggaaattgaagagctgaaagaaaagaacaacagcctgacgcaggaagtgcagtctgcacagcatcagcgtgaagaactcgagcgtgaaaataattctctgaaggaacagcagagcggctggcaggaacgtttgcaggcgctgcttggtcgtatggaagaagtctaatcctcgtcatatttcacgttatggcggcgttggctgcgtgcgttcaccccagtcacatagtggcctatgctcctggggattcacttacttgccgccttgccctgacgcgaaatctatagaggatttagaatgcggataccggtgggccggataaggcgtaagctgccatccggcaatcagcgacaacgcataaaaaaggcgccttacggcgccttttttgatcactcgatatcaagcgggtcttcggaaaggataatcccggtgttgtcggcatagagatgatcgccggagaagaacgtcacgccgccgaaattgacgcgcacatcgctttccccaatgccttcacctgcggcgccaaccggaatggcggcgatcgcctgaatgccgatatccagctcttccagatcgtccacctgacgcaccgcgccatagataaccagcccttcccattcattttgcgtggccagacgcgccagctccgcatcgactaatgcacgacggacagaaccgccgccatcgaccagcagaacccgaccacggccattttgttcgagcagatcgtacagcaacccgttgtcctcgaaacattttaccgtgatgatttgtccgccaaacgacgaccgccctccaaaattagagaacagcggttccacgacgttgacatcttcctgatagatgtcacaaagctcggaagtatcgtatttcataggcttaacgttcagttgctgcgagaatttttagtatatcgcgctaagtatactgttggcaaaatcatcaattgttaattgatatttgtcagttaaacggcccactgacttaagagtatcccaatcacaaataacaggttggttaacaacgcgcctttaacggtacgttcaagcatcgggcgcattgccgcaggctccctttcgcgcattacgtagcgcgcttgtttaatgagcaagggcgcggccagaataaacaaccatccccacggactgtgtagcgagagcagattaaacagcgccagacagagcagcgcgcctagcaacaggcaggcgtgataacgacgcgcgttgacatcgcccagtcgtactacaagggtgtttttgccgttctctctgtcgctattaatatcgcgcaggttattaatattcagcaccgccgtcgccagtaaaccgcaggcggtggccgggagaatcagcgccggaatcagcgtatgcgcctggagataccagctccccatgacacttagccagccaaagaataccaggacagagatatcacccagcccgatatagccgtagggccgattacccacggtgtaggtgatggcggcgataatcgacagcccgcccaaaatcaggaagccgacaaaatcggttaacgtatggcacgcgaccgccaccagcgccagtccggagatacagatcagcacgacggtaatgattaacgcccgcttcatctcctgtcgggtgatgacgcctttttgcatcccccgcagcggcccgatgcgatccggtttatcgctgcctttgacagcgtcgccataatcgttggcgaggttggataaaatttgcaacagcccggcggtgataagggccagcagcgcgaccagaggatcgaaatagccttgccaccatgccagggccgtaccgacgataatcgccgcgaaggcgaggggtaaggttttgggtcgtaagctttccagccaggcctgggtgcggctaatttgttgttgttcagtcatatttagcgccaataaaaatggggcttttcagccccatcaacagtgatgaaaatgcattggacgcgattataagataaaacggcttagatcttcatctgcgaccagcgcatccagatgtttgctcacatattccgcatcaattgtgatgttttggccgtgcagatcgctggcgttataggaaatctcttccatcagacgctccagtacggtatgcagacggcgcgcgccgatgttttcggtggtttcgttaacctgccaggcggcttcggcaatacgtttaataccggaatcggtgaactcgatattgacgccttcagttgccatcagcgctttatactgcacggtgacggaggcgtttggctcggtcaaaatgcgttcgaaatcgctggtggtcagcgcctgaagttcaacgcgaatcggcagacggccctgcagttccgggatcagatcagacggcttcgccacctggaacgcgccagaggcgataaacagaatatgatccgttttgaccatcccgtgtttggtcgaaaccgtgcagccttctaccagcggcagtaagtcgcgctgtacgccttcgcgtgaaacatccgggccggaggtttcgccacgcttacaaattttgtcaatttcatcgataaacacgatgccgtgctgttcaaccgcgtcgatagcgtcctgtttcagctcttccgggttgaccagtttagcagcctcttcttcaaccaacagtttcatcgcgtctttaattttcagcttacgcggtttctgtttctgaccgcccaggttctggaacatagactgcaactggctggtcatctcttccatgcccggaggcgccataatctctacgcccatcggcgcggcggcgaggttaatctcgatctctttatcgtcgagctggccttcgcgcagttttttgcggaacgtttgacgggcggcagaaggctcctgctgctgttcggcctggccccagttattttttgcgggtgggatcagtacgtcgagaatacgttcttccgccaactcttccgcacgatagcggtttttctcgatagcctgtacgcgaaccattttcaccgcggcatcggtcagatcgcggatgatagagtccacttctttcccgacatagcccacttcggtgaatttggtggcttcgactttaatgaacggcgcgttggcgagttttgccagacgacgggcgatttcggttttaccgacgccggtcgggccaatcatcagaatatttttcggcgttacttcgtggcgcagctcttcatcaagctgcatacgacgccagcggttacgcaatgcaatcgccacggaacgctttgcgttatcctggccgataatgtgtttgttcagttcgctgacaatttcgcgtggggtcatttcagacatgagaggtccttacgctttggcggtcaattcttcaatggtgtggaaatggttggtgtaaatgcagatatcgcctgcaatatccaacgccttttcagcaatttcgcgcgcgccgagctcggtattttccaacagagcgcgagcggcagcctgggcataaggaccgccggagccgatagcaattaaatcgttttcaggttgcacgacatcgccgttacccgtgatgatgagcgaggcggtttcatccgcgacggccagcaacgcttccagtttgcgtagcatacggtcggtacgccagtctttcgccagttcaacggcggctttgaccaggtgcccctgatgcatttccagtttacgttcaaacagctcgaacagcgtgaatgcatccgcagtaccgcccgcaaagcccgcaatgaccttgtcgttgtagaggcggcggactttcttcacgttgcctttcattactgtgttacccagtgtggcctgaccatcaccggcgattaccacgtggccgttacggcgtacgcttactattgttgtcacgagcagaccccttggttactaatgctgaattgcggccccgtacggcgtacggggcataatgcaagtatagatgggggagattttgagggtttcaacccccggtggcgagtcgaatgcagtttgtatggcccgccatcttcagacggttaatggtgctgtcggcattttctttacctttcaccggcccgataaccacgcgattccagccgttattggtggtaattttggagtcaaagccttcaaacgccagctgagcgcggacgctttctgcctgctcggcgcctttgaatgaaccacattgcaccatccagcgacgttcatcttttttctctgctgtcgccttcggcgcttcaggcgcgcgcgtaatgggcgcggcttttggcgctgccgcgctggtatgcgccggcgtttgcagcaaatcctgataaggttgctgcgaggccgtctgcttcggcggctgactttggcgcgcgggttgcgccggggcggactgtaccgtgcgcgtttgcggctgttcgtttacccgcggctgcgtacgtggttgctgaacaggctgcgtttgagcccactgctgctgctgcgcctgacgctggcgctgtagcgtttgctggcgttgttctggcgtctgctcgttccacggcacttcgttaagttgcgtcggctgctgacgcatatccgcctgcatctgttccaggagttgacgctgctcgctggtgagctgattcggattcatgacttcgccgccggcggacggttccgttggcgtacgcacgcccggctggcgactttccagctctttgatgtaacgccagcgctcttccggttttggcggaagcccattgccggtgactttctggttttgtagcgtttcggactcttctttcttatggtgagtaatgaagtacagaccgccgataaaggtcacaaggacggctgccgcaatcgcgaccattgccggcgagacggcaggcatgttgctttgcttcttccgtgagttccgtgaggtgctctttttgcgccgcgaaggagccggttggccgcgacgtacataatctcgttgtgccactatcgtttcgctgtatttattcgttcgtcagcccgtcatgttactgaagcggcgggcctttgaccagacaggtgagtcttaaagctatttactttagggtaaagcgcgcgtagaaccgcgaataatcagctcgcaatccattaaacgcgagccgctgctcacattttgcccctgcatctgatcgagcaacaacagcatcgcctcgcgaccaatgtcaaaacgcggctgcgccacggttgtcaacggagggtcgcaaaactcggccagcgcgatattgtcaaagccgataatcgacagatcgtcaggcactttcagaccctggcgcttggcccaggagagggcgcccagcgccattacgtcgctatgacaaaagacggcggtaggcggcaacggttgctcaagcaactgctttaatgcgtttgccccggcttcaaaggtaaagtcgccacgggcgatgtaatgcggatcgaccacaatgccactgcgtcttaatgcctgtacgtaaccttgtaagcgatagtgacagagcggcatatcttccggccccgcaatacaaccaattcgcttgtggcccaaatccaacaggtagttcatggcattgaacgcggcggtgaggttatcaatatgtaccgtcggcagttcaagctccggcgcgaactcattcgacatcaccatcggaggcaaattgcgctgctcctcaacgctggcgtcaaagggcagtcgggaactgagaagtaccatgccgtcgatctgtttggtgatgatgagattaagaaaggttttttctttctggttttgatgggcgcaatcgccaatcagcaccagatacccctgttctgccgcggtcacttcgataccgcggataatttcactgaagaagggatcgcaaatatccgggacaatcaccaaaatcgtacgggattcattgcgttttacatttcgccccatcgactgcgggaaataacccacttcaagcgcggcctgttcaacccggctacgggtcgactgggagactttatcggggttcattaacgcgcgggatacggttgccgtagagactttcgccttcaacgcaacatccttcatcgtagcggcagtaacctgcttgttcgatttcactctttctcctcgcctgggaactgctggcgcagatctatccctggtaacactcatcgaaaacatttttatcagatagtgcgtggaagcggttacagaattttcataaaaagtgtgatggatctttaattttacgatccgcctcgcatcgtgaggactatccttcaatcggatcgacgtccagaacccatttaactttccgcgcttccgggagcgtattgatcaacgccagcgtgccgctgatgatgtgttgcaggcgaatccgtgaaggatgctgaagtaaaatttgccagcgatagcggccgccgcgttttggcgcgagggccggaaccggacctaagatccacagcttatcgtctgatagcgggctggcctgaatcagattacgcaactgttggagaaagacgggcgcctgctgattgttatgatcctctgcgcgaataatgacgtggctggtccacggcggaagctggagcgtttgccgttccgccagcgcctgctccgcaaacgcatcatagcctttatacagtaacgtttgcagcaggggatgctcaggatggtgcgtttggagcaccacttcgccctgtttgcccgcgcgcccggcgcggccggaaacctgagtgtagagctgggcgaagcgttccgccgaacgaaaatctgcggaaaaaagcgcgccatcgacatccagcaacgccaccagcgtgacatccggaaagtgatggcctttcgccagcatttgtgtgcctatcaggatgcgtgctccgccgcggtgaacttccgccagatgctgctccagcgcgcctttacgactggtggtatcacggtcgattcgtgagatcggcacgccggggaagaagggcgccagcacctgctccagctgttccgtccctaacccaaccggtaacatatgtgtggagccgcaggaggggcactgacgcggtaccggacgctggctgtcgcagtgatgacagcgtaaatgatgctgcgcctggtgcagcgtgtagtagtgatcgcaacgcgggcactctgcaatccagccgcagtcgtggcaaagcagcgcgggcgcgaatccccggcggttaagaaataaaattacctgattgtcggcctggagatgttggcgcatacgggcgataagggcgggcgccagtcccgcctgaagacgctggccttttaaatccagcacatgctgcagagctgggcgggcgttgcctgcgcgccgcgtcagacgcagcatccggtattttttctgccgcacgttacatagcgtttccagggctggggtggcggagccgagaataatcgggatctgctcgctatgggcgcgatacactgccaaatcgcgggcgtggtagcgccacccttcctgctgtttataagagctgtcgtgctcttcgtcgatgacaatcacgccaagatttttaaacggcgtaaacagcgaggaacgcgtgccgatgacaatcgccgcttcgccgtttttcgctttcagccatgccgaaagacgctcgctgtcgtttagcccggaatgcagcacttccaccggcgcgttaaaacgttcgcgaaaacgggcgatcgtttgcggcgtcaggccgatttccggcaccatcaccagcgcctgtttgccctgggcgaggacgttttccagcacgctcagatacacttcggtcttgccggaaccggttacgcctgccagcaaccaggcggagaaaccgtccgacgcgctgtgaatcgcgccgactgctgtcgcctgttcggtattcagccgcaggcgctctcctgcgacggcataacgctcccgccagtcggtaaacgcgggcgtttcactggcaagctcacaaagtcccttacgccgcagcgtttgcagcgtggcgtcagtaaaatcaagctcggctacctgatagcgccagatctttccttgccgtagcgccgccagcgcctgttgttgtttggcggagcgtttcaggctgttgatatcgacggcttgcccctcttcggtggcgaaccaataccataggggcgcgttgctggctggttttccctgacgcaataaaaccggcagagcgtgaaacagaacgtcgccgaggggatggtggtagtaatccgccgcccagaggagtaagcgccagatggagggagaaaagattggctcgttatccaggatttcaatgaccgattttaattcatcgagcggcaattcgctgtggtcgctaatcgagacgacaatgcccacgcgctcttgctgcttgccgaatggcacgcgcacgcggcacccggctttggcgaccccgccttccggcagcaggtaatcaaaggttcggggaagcggaacgggcaaggcaacgtgcgcgacggacatagcatcttcctgacttgaaatttcgtcgggtagtatacacattacgataagggagcgcggatcagtttgcatacggtggtcaaattctgtatgattcgccgcctttggtgcgtgttgtgagcatcaaaccctttactattaacttcgcgtggtgtctggcgttagggctggaagagcgacgcggccttacactgaggttccccatgaaaaaaggtattcacccgaattacgtagaaattactgcaacctgttcttgcggtaatgttatcaaaacccactctaccgtgggtcacgacctgaacctggacgtgtgcggcaaatgccacccgttcttcactggtaagcagcgtgttgttgataccggtggtcgtgttgagcgcttcaacaagcgcttcagcatccctggcagcaaataagttaccgccagaaaaaaaagcgccgcagggcgctttttttgttttctagggataacagtatttgttcagacacattctgtgatccgtaatcgctttcattacgcttcctgccgtgagttttaacgaaggatttatagtcagtcccgcactttccagccccttcgctgtccatttattgcaggtattgagtatgccgtagcggccattcgcggcgtaaaactggctatcgccgtaaattccttgttttaacggaatcagattacccccttcgtcacgcgcaaagctgcggcccagatagcgcatcagactgttacgctggtttgtgtgcaggagcagtgattttatctcgctaccgacgaaatagcgttctggttgaccggaaaaggcgacgatgtgcataaccgcgccggatgaccagaacatggcctggagcgtaagcgcggtggttatttcttgtgactgataaaagcccttatcgccccagccgatttcataccactgcgtctcctgagcgaaccgttttttaagctgtggcagaacggtattaacatcatgggccggcgcaataattcccgtgtgccagccatgactgacgatatagatttccgtcggggagggctgtccgcctgtcgtaggttttacggcttgtggaaaggttgtgcagccatatagcaataaacttatccaggcgataaagagatttttcatgacatatcaccagcaaaggcgcggtatattgtggcgtttgtctaatgacgctgcgcttatcgggtcggtgccggattggtaattcattgatatttttgcattcctcttcgagggcaataaggcgaatgtcataactacaatacgttttaaccattcaggcggaagttagcttccgcctgttttacttttactatctcgctttattttttaaacatctgctctggatcgataatcagcgcccgataacccagcataccggcacggttactgtgtacttttagctccagcatcacatcctgagtaccgtctttgacttcatccagaacggaaacgatcggttttgtaccgctcattcccgctgtggccgagtacatgaacatcgttttggtttccgggcgatattccgtgacggaagtaatggcgctgtaccagtcaaaaccgcgctctttaccatattcccacatttgggaaaccgtcatatttttttcgtcaatttgatattccacgccgcgggaatatttcattgatggcatggccggttgttccatgccgcgcgcatcgccgttatcaaaggcggtcacgacggttttacctccggtgcttttggatggcactaaccaaccggtatgttgtgtccatgtccagtcaaatccaccgtcgcagtggtgcgcttcgcaggttagcggtttaccgttgctgtctacgggtttcagcacttttttcgccagttcgcctttccagccggatggatcggaaagtatccatttcacttttttatcgcgaccaattttgatgatggcagactggtggcgcgagctaatgataatgctgtcgtcgcgaggatcgtagctgacggagttaacatgcgcccagttgcggcccgggccggagcccgcgatatcgccgaagggttgttttgcaagctgctctttggtcatgacctgaccggaatgttcggcatcgacgctcaaacataccgctccctgatccatcgccagaataacgtcgtcacgataggggtcgaggatttttggcagatcccagtaatcgacggtatcgccgttctggtcaacttcaagaatatgatcacgcacagtattgatggtgtatttaccatttaatggataattttcttttgcgacacgcagcaggtaggtgcctttcggcgtttcggtaatggcgtgcgaaaaatcaataaatccttttggcagtcgtttatcggaaataacgcggcctaagaaatcatatttaaagtaacgttgaccctggccaaacataagattgccatcgttaacctgatggaagcccatcatggaaccaaagcgcgttatatcatcctggttacggaatttatcaatattcatatagccgcgaacatcgccattcgtatcgctaatccagttgataccggtataatcccagttcgccgcgccgcctgcgacatgcataatgtggccggctcttggcatccccgttatatggttaaaaagatataagcggtttttaagcgagctatcgactttaaccggttctaccgtaggaagaacggcagtttgcccggtagtagagggtaatgataccggtgcggcgtaaatggaccacgtataagtttgttttttaccttcttcagtccagtcaactttaactttattgacataatctggatacaagccaaatacaggtatgccgtcatgggtatttatagcctgcgggccgacatcataactgatcgggatgcctttttcccctttccctaaaacggtaaccttcacgtcctgtacattatgattggctttattaatgattgctgttaatgggaaaacgccgccgtagggagcgacatcgaccatacctaatggcccttcatggactggaatgacatctgctgatgcgaccattggcctgtttgggtctaaaacgcctgaggccaaaacgctgccgctcaaacacaggcagcataatacaggtaagactttccttgtaaataacatatttatttccccattcgatattatcgataaaatgaatgtatattaaccttcttatttatcggagatgaaaaaacatttaaaaaagtaaaacaatccgcggaggggaataatgatgttggtcacaaatatgaggtgtccatagtctttttaacaatactcattgttatactatttgttcagtaaatatatggcgctgtattattattcatatgcgctttgctacgtgaaacattaaataaatattagaagtttaaatataataaaattatatcggttataacatgccgggaattttttccaggaaaataacgaagagaaacttatcatgtctgacaaatttatccaccgagggttattcgggaagatgaacatttagaacaatgtcggagatagccgtgtacaaggggaatcgttaaaaaagcgcggccagaggcgttctgaccgcatgctttgctatcagtattcccacgtttccggatcaatccccaactcacgcatgatctcttttgccgcttccgggatttcatcgctgcgctcttttcgcagatcggcatcatccggcaagggttgcccggtaaaggcgtgcagaaatgcttcacacaacagctcgctgttggtggcgtggcgcaggttgttcacctgacgacgcgtacgttcatcggtgaggatttttaacaccttcagaggaatggaaaccgtaatttttttgacttgctcactcttcttaccgtgctcagcgtatgggctgatatattcgccgctccattcagccatgagatacttaatcctcttcgtcattaatattgaggtctgaacctgagcccggaccataatcgcgcgtagtttaccgtagtggcgcggccctgacacgaagttagcggtcgcagatgtgcgctaatgcatataattttaacggctatttgcggtttgctcaatctatacgcaaagaagtttagatgtccagatgtattgacgtctattgtggtagtggttaatctgtggcctgactttcaccgactcagccaggaatatcttcatatgacgcgtaaacaggccactatcgcagtgcgtagcggattaaacgatgacgaacaatacggctgcgttgtgccgccaatccatctctccagtacctataactttaccggtttcaatgagccgcgcgcgcatgattattcccgccgcggtaatcccacgcgtgatgttgttcagcgcgcattagcggaactggaaggcggcgcgggcgcggtattgacgaataccggcatgtcggcgattcatctggtcaccaccgttttcctcaagccgggcgatctgctggtcgcgccgcatgattgctatggcggcagttatcgtctgtttgacagtctggcgacacgcggctgttatcgtgtgcggtttgtcgatcagggcgatgaacgcgccttacaggcggcgctggaagaaaaaccgaagctggtactggtagaaagtccaagtaatccattgttacgcgtggtggatattgcgaaaatctgtcggctggcgcgcgaggcgggcgcagtgagcgtcgttgataacacgtttttaagcccggcgctgcaaaatccgctggcgttgggtgccgatctggtgttgcattcatgcacgaaatatctcaacggtcattcggatgtcgtggccggcgtggtgattgctaaagatccggaagtggtcactgaactggcgtggtgggcgaataatattggcgtgaccggcggggcgtttgatagctatctgctgctgcgcggtttgcgaactctggtgccgcgtatggagctggcgcagcgcaacgcgcaggcgattgtgaaatatctgcaaacccagccgttggtgaaaaaactgtatcatccgtcgctgccggaaaatcaggggcatgaaattgccgcgcgccagcaaaaaggctttggcgcaatgttgagttttgaactggatggggatgaggagacgctgcgtcgttttctgggcgggctgtcgctgtttacgctggcggaatctttagggggagtggaaagtttgatctctcacgccgccaccatgacgcatgccggtatgtcgccgcaggcgcgtgcctccgccgggatctccgaaacgctactgcgtatctccaccggtattgaagatggcgaagatttaattgccgacctggaaaatggcttccgggctgcaaacaaggggtaaacatgagtgtgattgcgcaggcaggggcgaaaggtcgtcaactgcataaatttggcggcagtagtctggcggatgtgaagtgttacctgcgtgtcgcaggcattatggcggagtattcgcagcctgacgatatgatggtagtgtccgccgcaggcagtaccaccaaccagttgattagctggctcaagttaagccagaccgatcgcctttctgcgcatcaggtattacagacgttacgccgctaccagtgcgatctgattagcgggctgcttcccgccgacgcggcagatgatttaaccagcgcttttattagcgatctggaacgtcttgccgccttgctcgacggcggcgtaacggatgccgtctatgctgagatcgtcggacacggcgaaatttggtcggcgagattgatgtccgccgtcctgaatcagcaggggctggatgccgcctggctggacgcgcgcgcatttttacgcgccgaacgcgccgcacagccgcaggttgatgaagggctatcttatcctttattgcagcagctactggcgcagcatccgggcaaacgtctggtcgtgaccggctttatcagccgcaatcatgacggcgaaacagtcctgttaggccggaacggttccgactattccgccacgcaaatcggcgcgctggcgggcgtttcccgcgtgaccatctggagcgatgtcgcgggcgtttatagcgccgacccgcgcaaagtgaaagatgcctgcctgctgccgttgctgcgtctggacgaagccagcgagctggcgcgtctggcggcgcctgttctgcacgcccgcacgctacagccagtgtccggcagcgatatcgatttgcagttgcgctgtagctacacgccggatcaagggtcaacccgaattgaacgagtgctggcttccgggacgggcgcgcgtatcgtgaccagtcacgatgatatctgtctgattgagtttcaggtgccagccagccaggatttcaggctggcgcataaagagctcgaccacattttaaaacgggcgcaggtgcgtccgctggcggtgggcgtgcatcgcgatcgccagctattgcagttctgctataccgccgaggtagcggatagcgtactgaaactcctcgacgatgtcgggctgccgggcgaattgcgcctgcgacaggggctggcgctggtggcgatggtcggtgcgggcgtcactcgcaatccgctacactgccatcgcttctggcagcagttgaaaggtcagccagtggagtttacctggcagtcggaggagggcatcagtctggtggcggtgctgcgtaccggcccaactgagagcctgattcaggggctgcatcagtctgttttccgcgccgaaaaacgcattggcctgatgctgttcggtaaggggaacatcggctcccgttggctggaactgtttgcccgtgaacaaagcacgctttccgcgcgtactggttttgaatttgtgctggcgggcgtggtggatagccgccgtagcctgttgaattatgaagggctggacgccagccgcgcgttggcattctttgatgatgaagccgttgagcaggacgaagagtcgctattcctgtggatgcgtgcgcatccgtatgatgatttagtggtgctggatgtaaccgccagtgcacagttagccgatcagtaccttgatttcgccagccacggttttcatgtgattagcgccaataaactggcgggcgcaagcgccagcgataagtatcgccagattcatgacgcgtttgaaaaaaccgggcgttactggctgtataacgccaccgtgggcgcgggattgccgatcaaccacacggtgcgggatctgattgacagcggcgatacgattctctcgatcagcgggatcttctccgggacgctatcctggctgttcctgcaatttgacggtacggtgccgttcaccgatctggtggatcaggcctggcagcaggggctgaccgaacccgatccgcgcgtcgatctttccggaaaagatgtcatgcgtaagctggtgattctggcgcgcgaggcgggatacgacatcgagccggatcaggtgcgtgtagaatcgttggtgccggcgcattgtgaagaaggatctatcgatcactttttcgaaaacggcgacgcgctgaatgaacagatggtgcagcgtctggaggcagcccgcgaactggggctggtgttgcgttacgtggcgcgtttcgacgccaatggcaaagcgcgcgtcggcgttgaagcggtgcgtccggaacatccgctggcggcgctgctgccgtgcgataatgtctttgctattgaaagccgctggtatcgcgataacccgctggtgatccgtgggccgggcgcgggtcgcgatgtgaccgccggggcgattcagtcggatatcaaccgtctggcgcagttgctgtaataaaggcaagttcgtgagcgaagcgccgggttgcgcttcgctccctcatcaatacgttatgcagtcattctgtagatactgatatacgaagcgccatccgattgctgacgaaacattatggcgtgatgctttttacattctcaacccggacatccatccgggggtaaggaatattgatgccgttttcatccattgcttccttgatattttccagaagatcgtagtaagtactccagtactgagcgttgggcacctatacgcgaacatagaaattcaggctagagggcgcaagttcgcccaggcggaccgtaatatcgcgggttttatcaatgcgatgatcttgctcaataatacgatgtatcacgttttttacgtcagcaatacggctttggtaatccacgccaataatcagatcaatacgtcgataggggtgtcgtgaatagttgataatattatcagcaataattttaccattcgggatgacaacttctttgctatccgcagtgagcagagtggtggagaaaatatggaccttttctactgtgccgataaccaggccaatttgtacaatttccccggcgcggaaaggacgcagggagacaagcagtacgcctgcggcaaagttggaaagtgacccttgcagcgccaggccaatggctaaacccgccgcgccgataacggcaataattgaggaggtttctataccgacacggccaagagcggctactgccgtgaaagctatcgtgatgtagcgaaccagcgcggagaaaaagtggacaatagtggcatccacttgccgcctgagaagtaatttttccagccccctcgatagtaagcgagctattaacttaccgatgaaaagtagaatgatggcggcaacaacattccagccaaaatgaattaccgagtcactgtgctcggccatccatttgatcgcgcctttaatttttggaaataactcaaaaccttccatgtttatcctctgtcagcagtatccgcggtattagcggtaataaaacggttcatttttgcctggataatcgccgcgccgacgggtggcagcagtaacgcccagaatagtgtccagccggttcgtattccgccatcttcgtttttattcgccagcagagcgcggatttcgtcgctaagcgtcagacacaatatggctgtgccaaacggcataatggctgacagccatcccgcgccacatgcggtcatgagtcggggcgaaggcgccacaaattgcatttcccggtgaattctgaagaaccaataaataatataaaatggaatgaaaaagcccaataatgcgacgacaaggggttctgcgcactcaggtcgctgggttgatgagaaccttttgggcggtgcaatatagaaaagttcttttttgagcggtaatagtagcaaaagcgcgataaccgctaaagtaattacgattattcctatataaggaattgagtatataaatatagacagatagccagcgatgataaatttgaacagtaagcagaggctaaataaaataacaaatgtctgagcactgccgatagcgctgaaaagcagcatggggactaacagcgttatgatccccatacccagattaattaaaaactgcgctatgataagcctgactacgtcagacgggccatttatgcagaaggaacagaccacgccaatgattaacaggagcgcaacaaagtagaaggggtaacaattttttatacggcagacaaaccagctggcaaccatacccaggaggtatcccagttggccgcaaacgagaataacaccaatacgatcggctggaatagacagtgatttactccaaaaataaacaccatacgacgatcccagcgaactgataaaagagagcaccaaaaagaaaaaagtgatcccccagaatcgatagctactcaggagatcggcgcaggtccattttttatctgacattgacggtaaagtaatttccatatttatcccttgttttccatagaaaataagaatgtatagaactatttaaattgataataaatattgattatgtgaataacgtttatagccgatcttaacttaaaacgaagggccattttataaaatagttctattctttttcagcgtataaaagcaggatgtgaggtgattaaatctatagcgccttctgaatgataatctgtgattttttatgcgtggcattacatcattgggttaaatgtgattccattgtgaattatatttttccgtcagaaaatacagaatttgcgtgacgcgtttggcggaatagtgggcgctttgctggaattcaggttgttgccatagccaggtaacaaagcggcgactggccgccagattaacggcgacaccttgttctaagtgggaaccggttaacgaacagaccattttgcggttgtgaccttgcccccagagttgccactgattttgccaccatccctgccatgttttgcctaacagttgccactctgcgcggcaatcgtcatcgtttatctcttcctcaacgaaccacagcgaggagagacgctggcgaaaccgctccgcccatgccgtaatgaccgcgccgcgcaaaaaacactcatgggcaatgatgtgtgtcgcgacatcaggaaagcggtttttcagcacccgaaaatgaccatgcgccgtaatgaccgggcgaagtattgttccttgcgcgttacgtttaagcgccgccgggccatactgaatctcatcgaactgacttcgctgtaaaaattgccgttctttaatggcgatacggtgaataatatcgcccttctcgccctcgggcggcgcaattcctttccagtggtaatgcaaactttttccggcagacagtaacgtgaaattgctggaaaggtgaagaatattgccgcgaacagcatcaaaactgaataaaaagtacaattgctggaaggcattcgctccctgaaacggtacgagcagcggaatactgcaaatctgttccggcgtttcggcgacattcagcgcgtgctgttttggcgtccagactttcttacagtactggcactgaagtcgctgcgttccgccgggattacgtccataacgaatccatgttttttgatagcagtcggggcaaaagtgaccatgctctttggcatattgcgcgatataagcagacgcccagcggcgaaattccccctcgttgaagagcggcggataactgccgcaggctcgacaatgcaatgccggataacccaggcgatagtccggccacacataatccggcgagtcaggcagcccaagattgcgacaaccagcgcttttgcaggcattaatggtgaacagaggcggcatacattttaccaacgattttggcaggtcgttgattctgccttcataaaacggtacgcgggtgtgaggactctcacataaaaaaacctttcagaacgtaacgtagcgaatctttatatgactgaaagggacttatttatgaaagtaaaactgcttgctgccggtattttgttcacgctgccgttctgggcctgcgccaaagatgtcaccattatttacaccaacgatctacacgcccatgtggagccttataaagtaccgtggattgctgacggtaaacgcgatattggcggttgggccaatatcaccacgctggtgaagcaggaaaaagccaaaaataaggcgacgtggttttttgatgccggagattactttaccggaccgtatatcagcagcctgacgaagggtaaagcgattatcgatattttgaataccatgcagtatgacgctgccactatcggtaatcatgagttcgatcatggctgggacaatacattgttgcaactgagccgggcgaaattccctatcgtacagggcaatattttttatgaggacagcagtaaatccttctgggataagccgtacaccattgttgaaaaagatggcgtcaagattggcgtaatcggcttacacggtgtctttgcttttaatgatacggtatccgccgcgacgcgcgtgggcattgaggcacgcgatgaaattaagtggctgcaacgttacattgatgaacttaaaggtaaagtcgatctgaccgtcgcgctgatccacgaaggcaccccggcccgccagtccagcatggggaataccgatgtgcgacgcgcgctggataaagatattcagaccgcaagtcaggtaaaagggctggatattttgattaccggccacgcgcatgtcggtacgccagaaccgattaaagtcggtaatacgctgatcctctcaacggacagcggcggtattgatgtgggtaaactggtgctggattacaaagagaaaccacaccactttacggtgaagaacttcgagctgaagaccatttttgctgatgagtggaagccagatccgcaaacgaaacaggtgatcgacggctggaacaaaaagctcgataaagtcgtgcagcaaacggtggcgcagtcgccggttgagctgacccgcgcgtatggcgaatcgtcgtcgctggggaatctggcggcggatgcgctgctttttacggcggggaaagacacccagttagcgcttactaactctggcggtatccgcaacgaaatcccggctggcgcggtgacgatgggggcggtaatcagtaccttcccgttccctaatgaactggtcacgatggatttaaccggtaaacaattgcgcagcctgatggagcatggcgctggcttaagcaacggcgtattgcaggtgtctaaagggctggagatgaagtatgacagcagcaaacctatcggccagcgggttaccgtgctgacgctcaatggcaagccgattgacgatgctacggtttatcacatcgctaccaacagcttccttgccgacggcggcgatggttttgcggcattcacggaaggccaggcgcggaacacctccggcggctactatgtgtcgaatgcgatagttgattactttaaggcgggcaacaccatcacggatgagcagctcaaaggaatgcgcgttgcggatgtgaagaagtaatttcccctgccgcggcgcgttcagtgtcgcggcgtgacatgaagaaaattcaactttgctgaatattcctcattctttggcgtgatttttcagttgacgtccttctgcttttccgtcatttttacatctggacgtctaaacggatagatgtttacaacacaacaaataataacatgcgattgatgaggtaaggtatgagcttttttcacgccaaccagcgggaagccctgaatcagagcctggcggaagtacagggtcagattaacgtttcgtttgaatttttcccgccgcgcaccagtgaaatggagcaaaccctgtggaactccatcgatcgcctgagcagtctgaaaccgaagtttgtttcggtaacgtatggcgccaactccggggaacgcgaccgcacccatagcgttattaaaggcatcaaagagcgtactgggcttgaggccgcgccgcaccttacctgtattgacgccacgcgcgatgaactgcgcaccatcgcccgcgactactggaataacggtatccgccacattgtcgctttgcgcggcgatttgccgccgggcagcggtaagccggagatgtacgccgccgatctggttggtttgctcaaagaggtggccgatttcgatatttcagtagcggcctatccggaggtacatccggaagcgaaaagcgcgcaggccgatctgcttaatctgaagcgtaaagtggatgctggcgctaaccgcgcgataacccaatttttcttcgatgtggaaagctacctgcgttttcgcgaccgctgtgtttctgccggtatcgacgtagaaattattcccggcattttaccggtgtctaactttaaacaggcaaaaaaatttgccgatatgaccaatgtccgcattccgtcctggatgtcactgatgtttgaggggctggataatgacgcagaaacccgcaagctggtgggcgctaacattgcgatggacatggtgaaaattttaagccgtgaaggagtgaaggatttccacttctacacgttgaatcgtgcggaaatgagttatgccatttgccacacgctgggcgtaagaccgggtttataacctccagctccctgccgggagctttattacaactcatattgatctacatctctgtaactaaaaatataaaaggtattagctatcgaatctgtggattaattcaactatatctatttgctcctggtgtatatcgtaacggtaacactttaaaagggagctgagatatgagcacgaccgacgatacccataacacgttatccactggaaaatgtcctttccatcagggggggcatgaccgaagcgcaggcgcagggactgccagccgcgactggtggccgaaccagcttcgcgtggatcttttgaatcaacattccaaccgttctaacccgctgggtgaagactttgactaccgcaaagagtttagcaagttagactactccgccctgaaaggggatctcaaggcgctgctgaccgattcacaaccgtggtggcccgctgactggggcagctatgtcggtttgtttattcgtatggcctggcatggcgctggcacctaccgttctattgatggtcgtggcggcgcgggtcgtggtcaacagcgttttgcgccgcttaactcctggccggataacgtcagcctggataaggcgcgtcgtttgttgtggccgattaagcagaaatatggccagaaaatttcctgggccgacctgtttattctggcgggtaacgtggcgctggaaaactccggcttccgtaccttcggtttcggcgccgggcgtgaagatgtctgggaaccggatctggatgtgaactggggcgatgaaaaagcctggttgactcaccgacaccctgaagcgctggcaaaagcgccgctgggcgcgaccgagatgggccttatctacgttaacccggaagggccggatcacagcggcgaaccactttctgccgccgccgctattcgcgctacctttggcaatatggggatgaacgacgaagagaccgtggcgttgatcgctggcgggcataccctcggtaaaacccacggcgcggcagcggcatcccatgtaggggccgatccggaagccgcgccgattgaagcgcagggcttaggttgggccagcagctatggtagtggcgttggcgcggatgctatcacctccgggctggaagtggtctggacgcagacgccgacccagtggagcaactatttcttcgagaacctgttcaaatatgagtgggtacaaacccgtagtccggctggcgctatccagtttgaagcggtagacgcgccggacatcatcccggacccgttcgatccgtcgaaaaaacgtaagccaaccatgctggtcaccgacctgacgctgcgttttgatccggagttcgagaagatttcccgtcgtttccttaacgatccgcaggcctttaatgaagcctttgctcgtgcctggttcaaactgacgcacagagatatgggaccaaaagcgcgttacatcggaccggaagtgccgaaagaagatctgatctggcaggacccgttgccgcaaccgctctatcagccaacgcaggaagacattatcaacctgaaagcggcgatcgctgcatccgggctttctattagcgagatggtttcggttgcctgggcatccgcgtctactttccgcggcggcgataagcgtggcggcgctaacggcgcgcgtctggcattagcgcctcagcgcgactgggatgtcaacgccgttgcggctcgcgttctgccggtattagaagagatccagaaaacgacgaataaagcctcgctggccgatattattgtgctggcgggcgtggtcggtatcgagcaggcggccgctgctgcgggtgtcagcatcagcgtaccttttgcgccgggccgggtggatgcgcgtcaggatcagaccgacatcgagatgttctcgctgcttgaaccgattgctgatggattccgtaactatcgtgcgcgtctggatgtgtcgacgaccgaatcgctgttgattgataaagcgcagcagttaacgttgaccgcgccggaaatgacggtactggttggcgggatgcgtgtgctgggaaccaactttgacggcagccagaacggtgtctttaccgacagaccgggcgtgctcagcactgacttcttcgctaatctgctggatatgcgttacgagtggaagcccaccgacgacgctaatgagctgttcgaaggccgggatcgtctgactggcgaggtaaaatacacggcgacccgcgccgatctggtgtttggttccaactccgtactgcgcgcgctggcggaagtttacgcgtgtagcgatgcgcacgagaagtttgtgaaggacttcgtcgcggcatgggtgaaagtgatgaacctggaccgtttcgatctgcaataatctgacaggttaattcgtcagcggctgctattcggtagtcgctgacgttttcctcgtttaatgcgaaaaataacgaaaatgccccgtgactttccagttaaataatacatcttcctcctgtgctcccgcgcctatgttatgcacaaccagcggcaccccttcaggcgtgacgttcagggataccacgccaatatgcgcaaggccgttatccagtcgccaggagacaatatctcccggttgataatcgctatatttatctgtcaccggcaaagctttgttttgacgctggaaccaggtttccagattcggaacgcggcgatggtcgatattgctgtccgggcgtttcagcttccagttattcgggtaggcagagaaatgcgcctgcatgtcttcatgtacccgtttctgtaaatcaacctgctgactgcgcagcgcgcggatgacgacatctgcacatacgccacgctccagcggaagatcgccattcggataatccagacgaacataggcagcatcataaaatagcgtcttacctatttgcgtcccggcactttgggcgattgcagcattagtttgcgcctgaacggttattggtctggtatcagagcgtggcgaatgatgagagatatggctaataaaaaaagcagcaagaataccgataagcgcctgtgcgaatttcatcttcttcgtccgtgaagtgtgtcagtacgtcatttgactttccgcggagagaatggtgcgtgataaaaaagtctatttcaggacaaaatggactgattccaggctatggaatacctgatgatggcgcttcgcttacccggcctggatgattggataacaaggccagataaggtgcctgtgtcgatattcggcaactgaattctgttgggtcagcaagctgaaatactcctgactatcgtcaggagtattgctcagaccttattcccattcctgcaagaagcgttgaccgtactggtcggcgaccagcagcgcggcgtacacttcatccggcgttgcgccgccaggcatgttatgaatagtttcaccttctgcgcaggaggcttccgcgacggtgcgcatcttggccggaatatcctgtttaatatccagttgcgccagcgtaatcggcaggccaacggaatggcacagcgccgcaacggtttcgatttcttcgaccggcgcgttttccagcaccagttgcgtcagcgtaccgaaagcgaccttctcaccgtgataatagtggtgcgcatccggaatcgccgttaaaccgttatgaatcgcgtgcgctgcggccagaccgccgctttcaaaaccgaccccgctcaggtaggtgttggcttcgatgacgcgttccagcgctggcgtgacgacgtgctgttcggcggccaacatggctttttcgccttcttcgatcagcgtgttatagcatagctccgccagcgccagcgcggcctgtgtacacttgccgcccgccattgtggtggcgccgctgcgtgagcaggcgcgcgcttcaaaccaggtcgccagtgcatcgccgataccggctgccagcagacgcgccggcgcgcccgccactatctgcgtatcgacaataaccatattcgggttatgcggcagcagcagataacggtcaaactcaccggcatcggtataaataaccgagagtgcgctgcacggtgcgtcggtagaggcgatggtcggcgcgatagcgaccgggacgttcataaagtgcgccagcgctttggcggtatccagcgttttaccgccgccgatacccagtacggcgccacactgacttttttcggcgacggcgcgcagcctgtcgatctcattttgcgaacattcgccgccaaacggggcgatttctactgacaaaccggcatccgtcaggcttttgcgcagcgtctcttcggcaaatcccagcacgaatttatcgcccacaaccagccagttgttcgccattggttttaaataatcgccaagacgcgcgatgacgtttgcaccctgaatatacttacctggtgactgaataatgcgatccatacatttctctcctacaggttcagattaccaaaagcgtttttccagtcttgctcaaacttctctattgccgactctaccgcaggcgtattgagcatttgttgcgctacatctaaaggaagggtaatcgcctggcaacctgccagtaagcaatccagcgcctgccgcggcgttttaaagctggccgccagtaccatgctgtcgggcgcgtgatgttccagtagcgtttgcagctcctgaaccatacgaatgccatcgccgccctgcgcatcaacgcggttgacgtagggagcgacatattttgcgcccgccagcgccgccagcaggccctgcgatgcgctgtagacggcggtgcccagcgtcacgatgccttcttttttcagcaatttaatcgctgcaagaccttcggcggtcaccggaattttaaccacaatgccggggatggcgttattcagtcgtttggcttcttccaccatccctttcgcgtcgcggctcatggtctgcgcaaataaagtgccttcttcgccgatggcgttttgcagcctgggcagcacatcccagatagattctttgctggctgccacaatgcttggattggtggtgacgccggcaatcgggaaaatgcgcgccagacgttcaacttccgccacgttagcggtatccagatagagttccatagtctttcctttacagttcaagttcatgttgcagcaggctggcgatagcgtcggcggaagcggcgttaaccagcgtgttgcggaattcttcgtgcatgatgcggcgggccaggcgcgagaaaatacgcatatgctggtcgcccgcggcgtgtttgttaagcgtcagcataatgatgaactgcgcctcgtcatctccccagcgtaccggcgcgttcaggcgcgccacgctgatggtggactgttcgatatgttccgatttgctgtgcggaatggcaaagctaaagcccagtccggtggagaataccgcctcgcgcgcccatagatcggcttccagtttgcgcgggtagcggcagcggcccgccagcagcagattgtcggtcatgcctttaatcacctcctctttgctgcgccagtcgctatcaagcgttatgcattgggcggtaaccagcggggcatcctgctgcgacatgcggaactgcgccagcagatgctccacctccagcgaggtgcggcaggccatcgcctgattcaacaactggcggcaggctcggctgtcgagttgtgccatccgcgctttggcggcgggaatcgacggcgcgcccatgctgatctcgtccagccccagacctaccagcaatggcagaaccgaacctttggcccccagttcgccgcacagaccaatccatttgccctgacgatgtaccgcctgcaccgcgaaatccaacgcgcgcaggaaggcgggattcaggctgttgtagtgacgagtgactttggcgttatcacggtctaccgccagcaggtattgtgttagatcgttactaccaatactaaagaaatcaatctcttcacagcattgatcgatgatgaacatcaccgacggcacttccagcataatgccgagtgggatcttctcatcgaacgggatatgttcattacgcagctgctgtttggcttccgccagcttctctttgacccacagaatctcttccatagaggagatcatcgggatcatgattttcaggttgccgtgggcggacgcgcggaggatcgagcgtagctgggtggtaaacagagaagcgtactcttcataaatacggacggcgcgatagccgaggaatgggttggcttcggcaggaatattcagataatcaacgggcttatcgccgcctatatccattgtgcgcacaataatgctgcgtccctttgcggactccagagcctggcaaaaaatattgtacagctcgttttcgtccggcgcgcaggcgcggtccatatacagcatttctgtgcggaacaggccaaccgcttccgcgccgttactaaaggccgcttgcgcctcgacggagtgcgcgatgttggcggcgacctccatgcggatgccgtcagcggtgcgcgcttcctgggtcagccagatgcgctgctgttcgcgcagggcgtcttgcacgcgggcttcctgctgatagtaacgagtgacaggctcgtcaggcgcaacgacaatcgcgcctgcgttgccgtcaatataaaccgtctgctgacgccacggtgttaaggcctcaatctccacgccaaccagggtgggaatgttgaatgagcgggcgagaatcaccgtgtgcgaagtggtgccgccgctttttaacagcagacctttgagaaaggttttatccagttcgaggaactggcttggcgtcaactcttccgccatacagatagatggccgggtcaactggcccggcgccggaaagcgctgcccaccgtaaatgtgttgcagtaactggaagcaaacgtcacgaacatccagcgcgcgttcctgtaaatagctgctgctggcgcgagcgaactcattgcagaaatggttcgcgctttccacgattgcctgcgcgcagcttaaaccgcgcagaacgccgtccagtaaatgctgacgcagtgaagcgtcgcctgccagtgaacgatgggcttccagaatcgcgctggcggcaccgtcactgtcgagctgacgaaactcaatatgctttatcaacatcgctaagccattgtccagcgcggcttgttccgtctctgtgtcgttggcggtcgggagttcgccgagcgcattgagatccagggaagagagtggcgtcagtacgccgcccgcgctgccgctacacacgctacgggcgcggtaaatctgcggattccgctgggtcaacgacgccggaagcggctccagttcgctgtttttaatctccgccagcggcgcgtcgcagagtgggaattcatcgcgcagccattgactcagacgctgacaggcaacctgttcatcggcaccggaaatcaccagctgacagtggtcgccagccagcgtgtcggtgccaatcagcgccagcgcgcttttggcgctgcctttgcgatcggtgcgcaggttgtgccactcaatttgcgacgtgaaggtattacacagcgtttctacgtggcttgccgggcgcgcatgtacgccattcggcagttcacaggtaaattccacaatcaggggcattgcctctctcccataacgattctctcgctacagcataaaaggaggtagccggaatacgccatgtgacaaatctgtcaaaagctggataaatgtaatgtagcgcaaaaagtgcgagttgtctcacaacttagcgtggtagcgcgggttttacctttttcagaagttatgaagcggatcgcatttttatactgatattacaaaaatccagtaaatggcctttttatccactgtctgcgcggcaatggattgcctattgttttccgcagtaactttatggacatgggctttatccagcccgggagcgacttatgaaagagttggtacagatcctgaaaaatacccgccagcacctgatgaccggtgtttcgcatatgatcccctttgtggtggctggcggaattttgctggcagtctccgtcatgctatatggcaagggcgccgtacccgatgccgccaccgatccgaatcttaaaaaactgtttgatatcggtgtcgccgggctgacgctgatggtgcctttcctcgccgcatacatcggttactccattgccgaacgctccgcgctggctccttgcgcaattggtgcctgggtgggtaacagcttcggcgcgggttttttcggggcacttatcgccggacttatcggcgggatcgtggtgcattacttgaagaaaatcccggtgcataaggtgctgcgttctgtgatgcctatttttgtgattcccatcgttggcacttttatcaccgcgggcatcatgatgtgggggctgggcgaaccgatcggtgcgctgacaagcagcctgacccaatggctgcaagggatgcagcagggcagcatcgtgctgctggcggtgatcatggggctgatgctggcttttgatatgggcggcccggttaacaaagtcgcttatgcgttcatgctgatttgcgtggcgcagggcgtatataccgtggtggctatcgccgcggtgagcatctgcgtaccgccactgggactggggctggcgacgctgattggccgcaagaatttttctgttgaagagcgcgaagccggtaaagccgcgctggtcatgggctgcgtgggcgtaacggaaggggcgattcctttcgccgctgccgatccgctgcgcgtgatcccatccattatggtgggctccgcttgcggtgcggtaatggccgcgctgtttggcgcgcagtgttatgccggttggggcggtttaattgttctgccagtcgtggaaggcaagctgggttatgtcgcggcagtcgccgtgggcgcggtggtaacggcagtctgcgttaacgtgctgaaaagcctgacgcgtaagaatgtgtcgcaagttgacgaaaaagaagacgacctggatttagattttgagatgaattaagcgaggaataagccatgactaaaattattgcagtaaccgcgtgtccttctggtgttgcgcatacctatatggcggctgaagcgctggaaagcgcagccaaagcgaaaggttgggatgtaaaagtggagactcagggctcgattgggctggaaaatgaactgacggcagaggatgtggcgagcgccgatatggtgattttgactaaagatatcggcatcaagttcgaagagcggtttgcgggtaaaactatcgttcgcgtcaatatcagcgacgcggtaaaacgcgccgacgccattatgaacaagattgacgcccatctttcgcaaaccgcgtaacgttaaaatgcccgatggcgcaagtttatcgggcctgctcacaggcccgataagagatttatgccgccatccggcgctcgtgtccacaggagctcctcatgacccatcgtattcaacgcctcaaagccgctctgtttcagaatcaccgtgaaatttctctggagcgcgcgctgctttataccgccagccatcagcagacggagggcgaaccggtcattttgcgccgcgccaaagcgacggcgtatatccttgaacatgttgaaatttcgattcgtgacgaggagctgattgccggaaaccgaaccgttaagccgcgcgcgggtattatgtcgccggaaatggacccgtattggctgcttaacgagctggatcggttcccgacgcgtccgcaggaccgttttgatatcagcgaagaggataagcgcctctatcgtgaggttctattcccgtactgggaaaaacggtcgatgaaagattttattaacgggcagatgaccgatgaggtgaaagccgccgtcagcacccagatttttagcattaaccagacggataaagggcaggggcatatcattattgattatccacgcttgctcaataacgggctgggtgaactggcggcgcagatgcgcgcgcgctgcgagcaacagccggaaaacgacttttatcaggccgctctgttgttacttgaggcatcgcaacgccacatcctgcgttatgccgtactggcggaacagcaggcggagcgctgcccggacgctcgtcgtcgtcaggaactgctcaccattgccgccaattcgcggcataacgcgcagcacaaaccacagacgttctggcaagcatgtcagctgttctggtacatgaacattattttgcagtacgagtccaacgccagttcgctatcgctcgggcgcttcgaccagtacatgctgccgttttatcagacttcgctcactcagggcgacgatccggcgttcctgaaagagttgctcgagtcgctgtgggtgaaatgcaacgatatcgtgctgctgcgttccaccagtagcgcgcgctattttgccggtttcccgacgggttacaccgcgctgctgggcggattgacggaaagcggacgcagcgcggtaaacgtgctctcttttctctgcctggatgcctaccagagcgtgcagttgccgcagccgaatctcggcgtgcgcactaacgcgctgattgatacgccgttcctgctcaagaccgccgagaccattcgcctcggtaccggcattccacagattttcaatgacgaagtggtggttcccgcgttccttaaccgtggcgtgtcgttggaggatgcgcgcgattatgcggtggtgggatgtgttgagctgtcgattccgggcagaacctacgggctgcatgacatcgccatgtttaatctgctgaaagtgatggaaatcagcttgtatgaaaatgagggcaacgacactcttacttatgaggcgttgctggcgcatattcgcgccaaaatcagtcactacattacactaatggtagaaggcagcaatatttgcgatatcggccatcgtgactgggcgccggtgccgctgctctcttcgtttatcagcgactgcctggagaaagggcgagacatcaccgacggcggcgcgcgctataacttttcgggcgtacagggcatcggtatcgccaacctgagtgattcccttcatgcgctcaatgggctggtattcgatcagcagcgcctgagttttgatgcgctgctgtcgatcctgaaaaacaacttcgccacgccagaaggggaaaagatccgcgccaggcttatcaaccgcttcgaaaaatatggcaacgacattgataatgtcgataacatcagcgccgaactgctgcggtattactgcaaagaggtggaaaaataccagaatccgcgcggcggccagtttacgccgggttcatacacggtttccgcgcatgtgccgctgggagcggtggtcggcgcgacaccggacgggcgttttgccggagaacagctggcggatggcggcctgtcgccgatgctcggacaggatatgcaagggccgacggcggtactaaaatcagtaagtaagttggataacacgctgctgtcgaacggtacgttgctgaacgtgaagtttactcctgcgactctggaaggagaggcgggactgcgcaagctggcggatttcctgcgcgcgtttacccagctcaaactgcagcacatccagtttaatgtggtgaatgccgacacattgcgcgaagcgcagctacggcctcaggatttcgctgggctggtggtgcgcgtggcgggctacagcgccttctttgtcgagctgtcgaaggagattcaggatgacattattcgccgcaccgcgcatcagttgtgaggttgtgggggcgcgcgatgaggagaccgcgcgtatcttcaatatccagcgctattcgctgaatgacgggcaggggattcgtacggtggtcttttttaagggctgtccgcatacctgtccgtggtgcgctaatccggaatctatctcgccgcgcattgaaacggtgcgccgggaaaataaatgcctgcgttgcacgccgtgtctgcgggatgccgacgaatgtccttccggcgcgtttgagcgtattgggcgtgatattacgctggatgaactggaacgcgaagtgctgaaagacgacatcttctttcgtacttccggcggcggggtgacgctttctggcggcgaagtgctgatgcaggcgccgttcgccacgcgcttcttacagcgattgcggcgttggggcgttccttgtgctattgaaacggctggcgatacgtcggccagccgtctactgccgttggcaagggcgtgtgatgaggtattgtttgatctgaaaattatggatgcggagcgggcgcgcgaggtgatcaacatgaatctgccgcgcgtactggagaatttacggttactggttagcgagggaatcacggtgatccctcgtttgccgttgattcctggctttacgcttaacgcagagaatctgcagtgcgcgttaacattgttgagatcattaggaataaagcaggttcacctgctaccgtttcatcagtacggcgagccgaaataccggctgcttggaaaatcatggatgatgaaagatattcccgcgccgtcggtgcaagagatcgctctgtttcgggagatggcggagcaagcaggatttcaggtcaccacaggaggttaatatggcagtacctgtacggcatctggtggcagtgaccgcctgcgtgagcggtgtagcgcatacctatatggctgctgaacggctggaaaaactttgccagcaggagaagtggagcatcaagattgaaacccagggggcactcggtacagagaaccgcttaacggaagaggatatccgccgtgccgatgtcgtgttgctcattaccgatatcgagctggcgggcgtggagcgatttacccggagtcgctatgtccagtcggggatcagcgcttttttgcgggagccacagcgggtaatgagcgctgtgcgtaaactcctttccgcgccgcaacatacccaccttatcctggagtaatctgcttttccgttagctggctgtgatactggcggcgatactccgacggcgagcgttccgtatttttgcgaaacaggcggcagaaatagttactgtcgacaaagccgcagcggtgcgccacctctttcactttcaggtcataacccttcagcaacgttttggcgtgttccagtcgcgtatggttcaggtattcgttaaagccgatggcccccgttttctggaacaggtgcgagaggtaatttggcgagatataaaacgcctgtgctaccgattcgcgcgtcaacggcgcggcgtagcgttcatcaatatactcccgaatggcttcaaaaagcgcgcggctgcgggaggcggtctggatttggctgccgagcagatcgcggcaatggcttagtaggctggcgacaatcaatctggccgtttgctgctcttgcggctgcatctgcatctcattaagcgtttgtaacaggaacgagccgatacgcgggccgcggcgcgcaacgtgctgtttcgtgaggttttgatgctgctgaccatcccagtggactacgctgaaacctaactgctgtttgccaaacagaatgctcagggtggtgacgggcgtttgccattgcgggatgttccagccgccagccggaacgtagagaacatcgcaaggaatgagcggggcggtaatgctcatgtcagtaagctcgccctccagcacaatctccagccgcggaaaatccacctggtacgccagttccggcgctgggccgctggcgctggcaaaataaatctggcgcagcggcagcgggccgttgatgagacgggagagaaggtggctgacgtcgtgatacatgataatcccctgccgatcgcaaacagaggaaacagtaacgtcgaaaaccgatgtcctcaagcgattattgccggatagcggcgctttgcgccttatccggactacgggagagaagcacgccaggcccgataagcgttagcgttatcgggcaacatacaggctattgattaccgacctgatcgccatacggcaacgtatcataatcaatcagcgcgtttttcttatacgggttgccaatccagcgcgtggtctctttgaactgcgggttggtgatggaacgcgtcgggtcgtagccatcataggtcaggcccgctaagtccgaccaggtatggataagctcggaactgctgtacttacgatcgacatcctgtgagaagtcgcgcggatgcgctgcctgccatttctctgaggtccacagcaggaacggcaccgtatacatatggcgggttggcgaatcttcgtttcgtccctgcgtcttatgcggcggcgtgtcatacacttcttcaccgtgatcggagaagtagagcaggaaaccgttcggatcggtcgctttatagtccttaatcaggctggcgacaacatagtcgttatacaggttcgcgttgtcgtaatcattatacgattccagctcgtcactgcttaatcccggcggaacatggtcggttttaccatcaaacttgccctggttttctggatagcggaacttgtatttaatatgcgttcccagcagatgcacaataatgaattttttcggcgccgggtcggctaacaccgctttaaacggcgccagcacgttgctgtcatattcgcgcgcgctttgagtgcgctgctggttcatatagaactgcttatcagtctgcttggagaacacggtcagcatggtattacgcgccgtcatcgtctgctggttagtgatccagaaggttttatacccggcctgtttcatcatattcatcagcgatggcttcgtcagataccagtccgggttcttttcgtccgcgaacgttagcgcctgttgcaggatctcaatggtgtacggtcgcgaagttaccacgttattaaacacggtcagcccggggtcggttttatgcagcgcgtccagttccggcgtggtttcgcgcggataaccgtacagactcatacggccacgctgggtcgattcgccaatcaccagtaccagcgtgcgcggcgcatcgccggagtggtcctggaagttagccagcggcggcagggcatcgttttcattcagcagtttattcagcgaggcgagctgtaaacggtactgatagtagccagtaataaattgccacggcgcggcgggttccattcgtgatgccaggctatccagcgttttctccatcgacttatgcttgataaaggtattcatcgcgatgggatggaggatcagcccgtacagcagggcaaacgacaccagataacgccagggggatggaatataaaccgggcgcagacgtgtccacagcaaaatcgccgccaccgtataagccagcgcgacaagaacaattttcagactgaaatattggcttaaatattcgctggcttcattggcgttggtttcaaacatcacaaacagcacgctttgcgagaactcctgcccgtagattacgtaatagctcagcgccgccagcgaggcggcccagagtacgacgccaataacggcagcaataacccggatgcggcctggaaacagaaagaccgggatcagccacagtgagctgtacagtagcgaatcccgcagaccgtttgtcccgctgtatccggtgagataaataatggcctgcaggagggtggaaaagaaccaaaagtagagcagtgcccagcccagggctttccagctaaacgcgggtttagtctggagtaatgtggattgcataatgagagcctgtctttaatcgtagcgccaaacgtaacgcctgaaccttaaaagaatctgaagcaaacctgctttatgccgcacgttttgctaagaaagatttacaaatgcataaaatgcagacagaaatatattgaaaaaatgacgaggatgacagcagtatttcatgccgcccccacataactgcgtgagagcggctctcttttggcgttagccggtgttgcgcataccggcagcgacgcccgcaatcgtgaccatcaacgcctgttcgacgcgaggatcgggcgatttgccctgctcttcagtcagacgggaacgatacagcaattcggcctgcaacacgtttaatggatcggtataaacgtttcttaactgaatggactccgcaatccacggtaagtcggccatcaggtgcgaatcgttggcaatcgccagcaccactttaatgtcttcttccagtaggtctcgtagctctttgcccagcggccaaagcgttttcgccaccaggcgctgatcgtaatagtcggccagccacaggtcggctttcgagaacaccatttccagcatcccaagacgcgtggagaagaacggccagtcgcggcacatggcttccagttcgctttgtttaccgtcttccaccactttttgcagcgcagtacccgcgcccagccaggctggcagcatcaggcggttttgcgtccaggcgaagatccacggaatcgcgcgcagcgattcgacgccgccagttggacgacgtttcgccggacgtgagccgagcggcaatttgcccaactcttgctccggcgtcgcggagcggaagtacggtacaaagtctttattttcgcgcacgtagccgcggtaggtttcacaggagatgacggaaagctcatccataatatgacgccagctgtctttcggttccggcggcggcagcaggtttgcttccagaattgcgctggtgtagagcgagaggctgctgacggtgacttccggcaggccgtatttgaagcggatcatctcgccctgctcggtcacgcgcagaccgcctttcagactgcctggcggttgcgaaagcagcgccgcgtgggctggcgcgccgccacggccaatagatccgccgcggccgtggaagagggtaagctcgatgccggctttttcacaggttttgatcagggcgtcctgcgcctgatactgcgcccatgacgcggccataacgccggcgtctttcgccgagtcggagtagccgatcatgaccatctgcttaccctgaatcagtccgcgataccagtcgatattcaacaactgggtcatcacgtcgtcggcattgttcaggtcatcgagggtttcaaacagcggcgcgaccggcatggcaaagccgatacctgcctctttcagcagcagatgcacagccagcacatcagacggcgttttcgccattgaaattacgtaggcggcgatcgatccttttggcgcttcggcaataaccttgcaggtttcaagcacttcgcgggtatcgttgctcggctcccagttacgcggcagcagcggacgtttggagttcagttcgcggatcaggaaggcctgcttgtcggcttccgaccagctttcgtagtcgccaataccgaggtagcgggtaatttcgcccagcgcttcagtatggcgggtactttcctggcggatatcaatacgcaccagcggtacgccgaaacacttcacgcggcggagcgtgtcgagtaactcgccgttggcgataatgcccatgccgcaggcctgtaacgactggtagcaggcgtacagaggttcccagagctgctcgttttgcgtcagcaggccagccggtttgggcagcttctcgcctttcagacgcgcttccagccaggactgggtcgccatcagacgggcgcgcaattttttcatcaggtagcgatacggctcagacgcgccttcttcgcccactaacgccagcagctccggcgtggcgtcgaccatcgacagttctgataccagaacatgaatgtctttcaggaacagatcggtggctttccagcggcttaacaagagtacgtggcgggtgatatccgccgtcacgttcgggttgccgtcacggtcgccgcccatccaggaggtaaaacgtaccggcacaaaatccaccggcaatttgtagccgagattttcttccagctgttcgttcagttcacgcagatagttaggtacgccctgccacaggctgttctcaaccacggcgaagccccatttggcttcatccaccgggcttggacgctgcttgcggatctcatccgtatgccaggattgggcaatcaactggcgcaggcgacgcattacctggtggcgttcgtagtcggcgatatcggtattatcaagctgttttagacagttgttgatttcacccattttgtgaataagcgtacggcgggtaatttctgtcggatgggcggttagcaccaactccagagacagcgactctaccgcttttttgatggttgcgtcgttgaggtccggttggtttttcagtttgcgcagagtgcgggcaatcacttccgggttgctggcggcttcgccttttggcgaaatgctgtggtattgctcggcagtattggccaggttcaggaactgactaaacgcgcgcgcaactggcagcagctcgtcattagacaaattttgtagcgtggtgagcagctcctggcgattagcttcattgccggcgcgtgaagatttggatagcttacggattgtttctacgcgatcaagaatgtgttctcccagcgcatccttgatggtttctcccagcaccttgccgagcatactgacattactacgcaacgcggaatattgttcgttcatatgaccccagacaccccatctttaatgtaattgccctgtctctttcatgccacagcggcagtggctgcgctcgcccgtatgccagttctgcggaatgggctcgtttgccgccttgctgtgacgtgaaatttttcggactttgctttttagccgtcttttataaagccacgtaaaacccgtggcgtcaattactgcgaaatcggttcagcaaacgaagaaatgacggtaatttattaaagttaattcgcatcgtgccaaataagaaatgcttatgaacatgtggcgtagagacgccggatggcgctgcgcttatccggcctacaagacggggtaggcccggtaaacatcacgtcaccgggcaatatgcattaatgccagcaaaaatggtgtactacctgggtaatcaattcccgggttggcttaataaaacgcgtttcgagatattcatccggctgatgcgcctgattaattgagcccggaccaagcaccagcgttgggcataatgtctgcataaacggcgcttcagtacagtagttcaccacgtcggttttcgttcccaacagtttttctactacttcaaccagttggtggtccggtggacactcataacctggaatcggcggatgtaattccgccaccgtcaggcggcccggccagcgttcgcttaccggggccagcgcgtcgttaagcagtccattaaggtcgtttaacgtcatgcccggcagtggacgaatatccatatgcaattcgcagcaggcgcagatacggtttgaggcatcgccgccgtgaatatggcccagattcagcgttggatacggaacggtaaacgcctcgtagtgataccgcgctttcagcgagtcacgcagttgcatgatatggccaatcgcatcgtgcatcagttcaatggcgttaaccccacgcgccgggtcgctggaatgaccggactgccccaggacgcgaacgacattagagatatgccctttgtgcgcgcgtatcggttgcaacgacgtcggttcgccaatgatcgcgcagtccggacgtaatgccgtggttttggaaaaataacgcgcccccgccatgctggtctcttcatcggcggtcgccagaatgtagagcggctttttcaactttgtgacgtcaacgtcacgtagcgcgtccagaataaaagcgaagaagcctttcatatccgcagtgcccagaccatagagcttattgtcgtgctcggtcagcgtgaacgggtcgcgcgtccagcgtccgtcatcaaagggaaccgtgtcggtatggccggtcagcagcaaaccgcccgcgccatgtccggtgctggcgagcatattaaatttgtttcgcgttcctggaaccggttgaacctctacgttgaaaccaagatcgctgaaccagcctgcaagcaaagtgattaaagacgcattactttgatccagggattcttcggttgcgcttatcgacggtgtggcaatcaaagcgcggtaaatctcgataaatggcggtaaaacgtttttcattgttgacacacctcaggtcatgatagtatcaatattcatgcattaattatgaataaaaatacattaacgttgagcataaaggaacccgatgttgaatacgctgattgtaggcgctagcggttatgcgggcgcagagcttgtaagctacgtaaatcgccacccacatatgaccataaccgctttgaccgtctcagcgcaaagcaatgatgcaggaaagttaatttctgatttacatccgcagttaaaagggattgtcgacctgccattgcaaccgatgtcggatgtacgtgactttagcgcagatgttgatgtggtgttcctggcgacagcgcatgaagtgagccacgatctggcgccgcaatttttacaggccggatgcgtcgtattcgatctttccggcgcgtttcgggtaaacgatcgcgccttctatgaaaagtattacggatttactcatcagtatcctgagctgctggagcaggcggtgtacggtctggcggagtggaatgtcgataaactgaacacggcgaatctgattgcggttcctggttgctatccaaccgcagcgcagttgtcgctaaaaccgctgattgacggcgggcttctcgatctgacgcagtggccggtaattaatgccaccagcggggtgagcggcgcggggcgcaaggcggcaatatcgaacagtttctgtgaagtgagtttgcaaccgtatggcgtgtttacgcatcgtcatcagccggaaatcgccgtccatctgggcgcggaggtcatcttcaccccgcatctggggaatttcccgcgcgggattctggaaaccattacctgccgcctgaaagcgggagtaacccatgcgcaggtcgccgacgtgttgcaaaaagcctatggcgacaaaccgctggtgcgcctgtatgacaaaggcgttccggcgttaaagaacgtcgtcgggctgccgttctgcgatattggttttgccgtccagggcgaacatctgattgtggtggcaaccgaagacaacttgttgaaaggcgcagcggcgcaggcggtgcagtgcgctaatattcgttttggcttcgctgaaacgcagtctcttatttaagggtgaaatgatgaatccattaattatcaagctgggtggcgtattactggatagcgaagaggctctggaacgtctttttaccgcgctggtcaactatcgtgagtcccatcagcgtccgctggtgattgttcacggcggcggttgcgtggtggatgagctgatgaaagggcttaatttgccagtgaaaaagaaagacggcctgcgcgtgacgcctgccgatcagattggcatcattaccggcgcgctggcgggaaccgctaacaaaactctgctggcctgggcgaagaaacaccatatcgcctctgttggtctgtttctgggcgatggcgacagcgtaaacgtgactcaactcgatgaagcgttaggccacgtcgggctggcgcagccggggtcgccgaagctgattaacatgctgctggaaaacggctttctgccggtggtcagctccattggcgtaacagacgacggtcaactgatgaacgtcaacgccgatcaggcggcaaccgcgctggcggcgacgctgggggccgatctgatcctgctttccgacgtgagcggtattctggacggcaaaggccagcgtatcgccgaaatgacggcgtccaaagccgagcagcttatcgaccagggcattattaccgacgggatgattgtgaaagtgaatgcggctctcgatgctgcgcgggcgctggggcgcccggtggatatcgcttcctggcgtcatgcggagcaactgccggcgctgtttaacggcacgccgattggcacgcgtattctggcttaactatttgttcgcccgatggcggctgcgtcttatcgggcctatgtgaacagaaattgtaggccggataagcgtagcgccatccggcagtgaaattcgaagaatttaaggaagtctattatggcactttggggtgggcgttttacacaggcggcagaccagcggtttaaacaattcaatgattcgttgcgcttcgattaccgtctggcggagcaggatattgtcggttctgtggcctggtccaaagcattggtcacggtaggcgtactgactgccgatgagcaacgacagttggaagaagcgctgaacgtgctgctggaagaggttcgcgcgaatccgcagcaaatcctgcaaagcgatgcggaagatatccatagctgggtggaaggtaagctcatcgacaaagtgggtcagttgggtaaaaagctgcacaccgggcgcagccgtaacgatcaagtggcgacggacctgaaactgtggtgcaaagagacggtgagggaactgcttaccgctaaccgccagttacagagcgcgctggtggaaaccgcgcaggcgaaccaggacgcggtaatgccgggatatacccatctgcaacgcgcgcaaccagtgactttcgcccactggtgtctcgcgtatgtcgaaatgctggcgcgcgatgaaagccgcctgcaggacacgcttaaacgtctggacgtgagtccgctaggctgcggcgcgttggcgggaacggcctatgaaattgaccgtgaacaattggcaggctggctgggctttacctctgcgacccgcaacagcctggacagcgtgtccgatcgtgaccacgtactggaactgctttctgatgcggctatcggcatggtgcatctgtcacgcttcgcggaagatctgattttctttaattctggtgaagcgggctttgtagagctttctgaccgcgtgacttccggttcatcgttaatgccgcagaagaaaaacccggacgcgctggagctgattcgcggtaagtgcggtcgcgtacaaggggcgctaaccggcatgatgatgactttaaaaggtctgccgctggcgtataacaaagatatgcaggaagacaaagaagggctgttcgatgcgctcgatacctggcttgactgcctgcatatggcggcgttggtgctggacggtattcaggtgaaacgcccacgttgtcaggacgcggcgcaacaggggtatgccaacgccacggagctggcggattacctggtcgcgaaaggcgtgccgttccgcgaagcgcaccatattgttggcgaagcggtggtagaagctattcgccagggtaagccgctggaagcgttgccgctggccgatttacagaaattcagccgcgtgattggcgacgatgtgtatccgatattgtctttgcagtcgtgtctggataaacgggcggcaaaaggcggcgtttctccgctgcaggtggcgcaggccatcaacgatgcgaaggcgcgcctcgcgttgtaagccttataagcatagcgccatcaggcaatactgcccggccgagcatcagcgacgccgggtttttttacgcaaaaaaaaagcggaccagaggtccgcaaaagttcacgttggctttagttatttcgggttcgagagataccctctgaacgggcggtgtcttcaagggttaaacgagaaaccgctccgttctgtgatgtattattaatcagaaaggttgatagggataatcgttcattgctatgctacctatcgccatgaactatcgtggcgacggaggatgaataatgaatattcgtgatcttgaatatctggtggcgttagccgaacatcgccatttccggcgagcggcggactcctgtcacgtcagccagccaacccttagcgggcaaatacgtaagctggaagatgagctgggcgttatgctgctggagcgtacgagccgtaaggtgctgtttacccaggcgggcttactgctggtggatcaggcgcgtaccgtactgcgtgaggtcaaggtgctcaaggagatggcaagccaacaaggcgagacgatgtccggcccgctgcatattggtttaatcccaacaattggtccctatttgctgccgcttatcattccaatgttgcaccagactttcccgaagctggaaatgtatctgcatgaggcgcaaacgcatcagttgttagcgcaactcgatagcggcaagcttgactgcgctattctggcgctggtgaaagagagcgaggcgtttatcgaagtgccgctgtttgatgagcccatgatgctggctatttatgaggatcatccgtgggcgaatcgcgatcgcgtgccgatgtccgatctggcgggcgagaaattgctgatgctggaagatggccactgtctgcgcgatcaggcgatggggttctgttttgaagcgggagcggatgaagatacccatttccgggcgaccagtctggaaacgctgcgcaacatggtggcggcgggcagtggtattacactactccccgcgctggccgtaccgcaggagcgtaagcgcgacggcgtggtttatctgccatgcattaagccggagccgcgtcgtaccgtggggctggtttatcgcccgggatcgccgctgcgtagccgttatgagcaactggcagaggccatccgtggcgcaatggatggccatttcgacaaggcgttaaaacaggcggtttaagccgttcaacgccgcaacccgataagcttccgccatggttgggtagttaaaggtggtgttaacgaagtattcgatggtgttaccgccacctttctgctccatgatcgcctggccgatatgaataatttcggcggcgcgttcgccaaagcagtgaatccccagaatttctttggtttcgcggtggaagagaatttttagcgtgccgacgttcatgccgacgatttgcgctcgcgccagatgcttaaattgcgcgcggcccacttcgtaaggcactttcattgccgttaactgctgctcggttttgccgacagaactgatttccggaatggtataaatcccggtggggatatcttcgatgagatgcgcggtcgcttcgcctttcaccagcgcctgcgctgcaatacgcccctgatcgtaggcggcggaggccagactgggatagccaatcacgtcgcccaccgcatagacgtgcggcagggcggtctggtacatactgttgactttgagctgtccacggctgtctgtttccagaccaatattctccagcgccagcgaatcggtgttaccggtacggccattagcatagagcaggcagtcagccttcagttttttgccggatttcaggtgcatgatgacgccatcatcgcagccttcgattttctcatactcttcattgtggcgaataaccacgccgctattccagaaatggtaagagagagagtcggacatctcctgatcgagaaaggccagcaggcgatcgcgggtgttgatcagatccactttcacatccataccgcggaagatggacgcatattcgcagccgataacgccggcgccgtaaataataacgtggcgcggttcatggtggagactcaggattgagtcgctgtcataaatgcgcggatgcgagaaatccacatcattgggatggtaaggacgcgaaccacaggcaataacaaatttttctgccgtcagggtttcaaccgtgccgtcatggcattccagcgccagggtatgttcgtcaataaaatgggcgttgccctgcaatatttcacagtggttacgctcataaaacccctgacgcatacgcgtttgttgattaatcacgttatcggcatgattaaggatgtcggcgaaagaagaacgaaggagacgggagtggtcgctatagagcgggttttgattaaattcaataatgcggctgacggcgtggcgaagggctttggatgggatggtgccccagtgggtacatccgccgccaacgttatgataacgctcaatcaccgcgacgcgtgctccttgcttaaccagacccattgcagcgccttcaccgccggggcctgaccctatgacgactgcatcataatcccaggaatgtggcatggtattactcacctgtttttatacataaaataaacacgatgataacatttgcccagctttaacccaattatcgttgtgcttttttgcgaagccggagcacaaactgtctgtaaacaatcattcacaatccagtgtgaacccgttacttttattctctggtatagtgccgaataaggcatatggaaggattcagacattgtgatgggtgttagagcgcaacaaaaagaaaaaacccggcgttcgctggtggaagccgcattcagccaactgagcgctgagcggagttttgccagcctgagtttgcgtgaggtggcgcgtgaagcgggcattgcgccaacgtcgttttaccgtcattttcgcgatgtcgatgaactcggtctgacgatggtggatgaaagcggtctgatgctgcgtcagttgatgcgtcaggcgcgacagcgtatcgcgaaaggcggcagcgtcattcgcacgtcggtctccacatttatggagtttatcggcaacaaccccaacgccttccgtctgttattgcgcgaacgttccggcacttcagcggcgtttcgtgccgccgtcgcacgggagattcagcactttattgcggaacttgccgactatctggaactcgaaaaccatatgccgcgcgcgtttactgaagcccaggccgaagcgatggtaactattgtctttagcgcgggcgcagaggcgttggacatcggcgctgaacagcgtcggcaattagaagagcggctggtattgcaactgcgcatgattgcgaaaggggcgtattactggtatcgccgtgagcaagagaaaatagcacatcattccgaataacgtgaaggacgagtaatgaaacagtcaggtcaagataaaggtacgctgttgctggcgctcatcgctggcttatcgattaacggcacattcgcggcgctgtttagcgctattgtgccgttctccgtattcccgattatctcgctggtgctgacggtatattgcctgcatcagcgctaccaaaatcgtactatgccggtaggtttgccggggttggccgccgcttgtttcattcttggcgttttactgtatagcaccgtcgtgcgtgcagaatatccggatattggctctaatttcttcccggcggtgctgtcggtgattctggtattctggattggctttaaactgcgtaaccgcaagcaggacaccgcggaatagtgtgcgaatgccggatggcggtataaccggccatccgacgtacattttaccttgcggtgagtaataccccgcattccatatgatgtgtatacgggaactgatcgaatagcgccaggcgagacaccgtgtgcgtctggcttaacgtttccaggtttttgcacaacgtttccggattgcaggaaatgtacagaatacgtggataagcctgcaccattttttccgtttcgctgtccagaccgctgcgcggcggatcgacaaaaatggtttcgcactgatagcgcttcaggtcgatcccctgcaggcggttaaactcacgaacgccattcatcgcctgggtaaactcttccgccgccatgcgaataatttgcacattatcaatatgattagcggcaatattgtactgtgcggcagcgacggacggtttggcgatttcggttgccagcacgcggttaaaattgcgcgccagcgctaaagaaaaattgccgttgccgcaatacaactcaagcagatcgccttttgagtctttcgtcacctccagcgcccactctaacatctgaatattcatggcggcgtttggctgcgtaaagctgttttcgacctggcggtagatcatctctttacctgccacaggcagacgctcatcaatataatcctgatccaattcgattttagttttagtggcccggccaatcaggtgtacgttcagaccttgcgcgcgtaaagcatcgcgtaacgcagtggcggcttcacgccactcttcgtccagcttcttatggtacagcaacgacactaccgcctggttgctcaaggtcgtgagataatcgatctggaacagcttatgccgcagtgcatgattatcgcgcacgccggcaatcatcgccttcattaaggtattaatcagttggctggccgccgggaaggtgtcaacgcgaatccggcttttggtctgctgatcaaacataatgtggtacaggtcatcgccgtcatgccacaggcgaaattccgcacgcatacgatagtgactgaccggcgagcgaaatacttccggaaccaggccagaaaacggcgccatcatactctgcaagcgcgccactttttcggccagctgcgcctcatactgttctgtcggaagatgttcgggggtcatatcgcatcctgaataataaaagtacgcggggattgtagggattgctcagtggatgtccagctattgatgatttctgatttgtgatgcgcggtctggacagggtgttgtgacagacggtagcatccgtgggccggtcctgtgagttaatagggaatccagtgaaaatctggagctgacgcgcagcggtaaggaaaggtgagatgagagcgtaagcagacactgcctccggcgggaagtcatcatttctgctatccagccaacggataaccctccaagcccgaagacctgccggctaacgtcgcatctggtttttcatcatcgcgtactatcgatgaagcctgcggcatccttcttatattgtggatgctttacaatgattaaaaaagctacgctgctgacggcgttctccgtcacggccttttccgcttgggcgcaggacactagcccggataccctggttgtcaccgccaaccgttttcagcagccgcgcagcgcggttctggcgcccgttaccatcgtgacgcgtcaggatattgaacgctggcaatcgacctccgtaaatgatgttctgcgccgtttgcctggcgtcgatattgcgcagagcggcggcgccggacaaaactcctccattttcattcgcggcaccaactccagccatgtactggtattgattgacggcgtgcgtctgaatttagcaggcgtgagcgggtccgccgatctcagccagttcccggtgtcgctggtacagcgcattgaatatattcgcggtccgcgctccgctatttatggttccgatgctatcggcggcgtagtgaatatcattacgacgcgcgataacccaggcacagaattaaccgctggatggggaagcaatagctaccagaattacgacatctcgacgcaacagcaacttggcgaaaacacgcgggcgacgttgatcggcgattacgaatacaccaaagggtttgacgtggtagcgaaaggcggtaccgggatgcaggcgcagcctgaccgggacggctttttgagtaaaacgctttatggcgcgttagagcataccttttctgatcgctggagcggattcgtgcgtggttatggctacgataaccgtaccgattacgacgcctattactcgccgggctcgccgctgattgatacacgcaaactttatagccaaagctgggacgccgggctgcactttaatggcgaacgtattcagtctcagctggtttcaagctatagccacagtaaagattacaactatgatccgcactatggccggtatgatacctccgccacgctggatgagatgaaacagtacaatgttcaatggaccaacagtgtggtcgtggggcacggtaatgttggggcgggcgtagactggcagaaacagactaccacgccaggtaccggctatgtgcccgagggatatgaccagcgtaataccggggtttacctgacaggattacaacagttgggtgacttcactctggaagcggcggcgcgcagtgatgacaactcccagtttggtcgtcatggtacatggcaaaccagcgcgggatgggagtttatagaaggttatcgctttattgcctcctacggaacctcctacaaagcgcctaatttgggccaactgtatggttattacggtaatccgaacctgaatcctgaaaagagtaaacagtgggaaggcgcatttgaagggctaaccgctggcgtcagctggcgtatttcaggttatcgtaacgatattaatgacatgatcgattatgacgatcatctgcaaaaatattacaacgaaggtaaggcgcgcattaaaggtattgaggcgacggcgaatttcgataccggaccgttaacgcatacggtcagttatgattacgttgatgcgcgtaatgcgattaccgatacgccattaccccggcgttccaaacagatggcaaaatatcaacttgactgggacgtttacgattttgactgggggatgacatatcaataccttggttcccgctatgattcggattactccgcttacccataccggacagtaaaaatgggcggcgtcagtttatgggatcttacggttgcatatccggtcacctcacatctgacagttcgtggtaaaatagccaacctgttcgacaaagattacgagacagtttatggctaccaaactgcaggacgagaatacaccttgtctggcagctacaccttctgaaccacgtcccaccgtgctggtatttgattccggcgtcggtggattgtcggtctatgatgagattcggcggctcctgccggatctccactatatatatgctttcgataacgtggctttcccctacggggaaaagagtgaaacgtttatcgtcgagcgcgttgtcgagattgtgactgcggtacagcagcgctatcccctttcactggcggtgattgcctgtaataccgccagtacggtctcacttcccgcattacgtgaaaagtttgccttcccggtggtgggcgttgtgcctgcgattaaaccagcggcgcggctgaccgcaaatggcgtcgtcgggctactggcgacgagagccacggtcaaacgtccttatactcacgagctgattgcgcgcttcgccaatgaatgtcagatagcgatgttagggtcggcagaactggtggaactggcggaagctaaattacatggcgattcggtatcgctggaagaactgcgccgcatattacgcccatggctacgaatgccggagccgcctgacacggtcgttctggggtgtacgcatttccctctattacgggacgagcttttgcaagtcctgcccgaagggacgcggttagtggattccggcgcggcgatagcgcgtcgtacagcctggctgttggaacatgaagcgccggatgcgaaatcaaccgatgccaatattgcttattgcatggcaatgacgccaggagctgaacaattattacccgttttacagcgttatggctttgaaacgctcgaaaaactgccggtttaatggcgttttgggtaaataccaggcacttgagaaattattttaaatttcctcttgtcaggcaaaaataactccctataatgcgccaccactgacacggaacaacggcacacaggccgccgggccagcggggttcagatcagaacctcacggagaaaagcgaaaataaacgcttgactctgaagcgggaaagcgtaatatgcacaccccgcgccgctgagaaaaagcgaagcggcactgctctttaacaatttatcagacaatctgtgtgggcactcgaagatacggattcttaacgtcgcaagacgaaaaatgaataccaagtctcaagagtgaacacgtaattcattacgaagtttaattcattgagcatcaaacttttaaattgaagagtttgatcatggctcagattgaacgctggcggcaggcctaacacatgcaagtcgaacggtaacaggaagcagcttgctgcttcgctgacgagtggcggacgggtgagtaatgtctgggaaactgcctgatggagggggataactactggaaacggtggctaataccgcataacgtcgcaagaccaaagagggggaccttcgggcctcttgccatcagatgtgcccagatgggattagcttgttggtgaggtaacggctcaccaaggcgacgatccctagctggtctgagaggatgaccagccacactggaactgagacacggtccagactcctacgggaggcagcagtggggaatattgcacaatgggcgcaagcctgatgcagccatgccgcgtgtatgaagaaggccttcgggttgtaaagtactttcagcggggaggaaggtgttgtggttaataaccgcagcaattgacgttacccgcagaagaagcaccggctaactccgtgccagcagccgcggtaatacggagggtgcaagcgttaatcggaattactgggcgtaaagcgcacgcaggcggtctgtcaagtcggatgtgaaatccccgggctcaacctgggaactgcattcgaaactggcaggcttgagtcttgtagaggggggtagaattccaggtgtagcggtgaaatgcgtagagatctggaggaataccggtggcgaaggcggccccctggacaaagactgacgctcaggtgcgaaagcgtggggagcaaacaggattagataccctggtagtccacgccgtaaacgatgtctacttggaggttgtgcccttgaggcgtggcttccggagctaacgcgttaagtagaccgcctggggagtacggccgcaaggttaaaactcaaatgaattgacgggggcccgcacaagcggtggagcatgtggtttaattcgatgcaacgcgaagaaccttacctggtcttgacatccacagaagaatccagagatggatttgtgccttcgggaactgtgagacaggtgctgcatggctgtcgtcagctcgtgttgtgaaatgttgggttaagtcccgcaacgagcgcaacccttatcctttgttgccagcgattaggtcgggaactcaaaggagactgccagtgataaactggaggaaggtggggatgacgtcaagtcatcatggcccttacgaccagggctacacacgtgctacaatggcgcatacaaagagaagcgacctcgcgagagcaagcggacctcataaagtgcgtcgtagtccggattggagtctgcaactcgactccatgaagtcggaatcgctagtaatcgtggatcagaatgccacggtgaatacgttcccgggccttgtacacaccgcccgtcacaccatgggagtgggttgcaaaagaagtaggtagcttaaccttcgggagggcgcttaccactttgtgattcatgactggggtgaagtcgtaacaaggtaaccgtaggggaacctgcggttggatcacctccttaccttaaagaaacggtctttgaagtgctcacacagattgtctgatgaaaaacgagcagtaaaacctctacaggcttgtagctcaggtggttagagcgcacccctgataagggtgaggtcggtggttcaagtccactcaggcctaccaaattttccctgaatactgcgttgtgaaataactcacatactgatgtatgcttcgttattccacgccttgtctcaggaaaaattatcggtaaagaggttctgactacacgatggggctatagctcagctgggagagcgcctgctttgcacgcaggaggtctgcggttcgatcccgcatagctccaccatctcgtgagtgtttacgaaaaaatacttcagagtgtacctgaaagggttcactgcgaagttttgctctttaaaaatctggatcaagctgaaaattgaaacacagaacaacgaaagttgttcgtgagtctctcaaattttcgcgacacgagaatgttttacgaaacatcttcgggttgtgaggttaagcgactaagcgtacacggtggatgccctggcagtcagaggcgatgaaggacgtgctaatctgcgataagcgccggtaaggtgatatgaaccgttataaccggcgatttccgaatggggaaacccagtgtgattcgtcacactatcattaactgaatccataggttaatgaggcgaaccgggggaactgaaacatctaagtaccccgaggaaaagaaatcaaccgagattcccccagtagcggcgagcgaacggggaggagcccagagcctgaatcagcatgtgtgttagtggaagcgtctggaaaggcgcgcgatacagggtgacagccccgtacacaaaagcgcatgtgctgtgagctcgatgagtagggcgggacacgtggtatcctgtctgaatatggggggaccatcctccaaggctaaatactcctgactgaccgatagtgaaccagtaccgtgagggaaaggcgaaaagaaccccggcgaggggagtgaaaaagaacctgaaaccgtgtacgtacaagcagtgggagcacccttcggggtgtgactgcgtaccttttgtataatgggtcagcgacttatattctgtagcaaggttaaccgtataggggagccggagggaaaccgagtcttaattgggcgttaagttgcagggtatagacccgaaacccggtgatctagccatgggcaggttgaaggttgggtaacactaactggaggaccgaaccgactaatgttgaaaaattagcggatgacctgtggctgggggtgaaaggccaatcaaaccgggagatagctggttctccccgaaagctatttaggtagcgcctcgtgaattcatctccgggggtagagcactgtttcggctagggggccatcccggcttaccaacccgatgcaaactgcgaataccggagaatgttatcacgggagacacacggcgggtgctaacgtccgtcgtgaagagggaaacaacccagaccgccagctaaggtcccaaagtcatggttaagtgggaaacgatgtgggaaggcccagacagccaggatgttggcttagaagcagccatcatttaaagaaagcgtaatagctcactggtcgagtcggcctgcgcggaagatgtaacggggctaaaccatgcaccgaagctgcggcagcgaacgtatcacccaagacaactttacggagttgacgattgacggagcgaagcgacgtcaaagcgttcattaaagtcgagttggcttagggatacgttcgttgggtaggggagcgttctgtaagcctgtgaaggtgtgtcgtgaggcatgctggaggtatcagaagtgcgaatgctgacataagtaacgataaagcgggtgaaaagcccgctcgccggaagaccaagggttcctgtccaacgttaatcggggcagggtgagtcgacccctaaggcgaggccgaaaggcgtagtcgatgggaaacgggttaatattcccgtacttggtgttactgcgaaggggggacggagaaggctatgttggccgggcgacggttgtcccggtttaagcgtgtaggtgtgtgttccaggtaaatccggttcactttaacactgaggcgtgacgacgaggcactacggtgctgaagcaacaaatgccctgcttccaggaaaagcctctaagcatcaggtaacatcaaatcgtaccccaaaccgacacaggtggtcaggtagagaataccaaggcgcttgagagaactcgggtgaaggaactaggcaaaatggtgccgtaacttcgggagaaggcacgctgacacgtaggtgaagtgatttactcatggagctgaagtcagtcgaagataccagctggctgcaactgtttattaaaaacacagcactgtgcaaacacgaaagtggacgtatacggtgtgacgcctgcccggtgccggaaggttaattgatggggtcagcgcaagcgaagctcctgatcgaagccccggtaaacggcggccgtaactataacggtcctaaggtagcgaaattccttgtcgggtaagttccgacctgcacgaatggcgtaatgatggccaggctgtctccacccgagactcagtgaaattgaactcgctgtgaagatgcagtgtacccgcggcaagacggaaagaccccgtgaacctttactatagcttgacactgaacattgagccttgatgtgtaggataggtgggaggctttgaagtgtggacgccagtctgcatggagccgaccttgaaataccaccctttaatgtttgatgttctaacgtggacccgtaatccgggttgcggacagtgtctggtgggtagtttgactggggcggtctcctcctaaagagtaacggaggagcacgaaggttggctaatcctggtcggacatcaggaggttagtgcaatggcataagccagcttgactgcgagcgtgacggcgcgagcaggtgcgaaagcaggtcatagtgatccggtggttctgaatggaagggccatcgctcaacggataaaaggtactccggggataacaggctgataccgcccaagagttcatatcgacggcggtgtttggcacctcgatgtcggctcatcacatcctggggctgaagtaggtcccaagggtatggctgttcgccatttaaagtggtacgcgagctgggtttagaacgtcgtgagacagttcggtccctatctgccgtgggcgctggagaactgaggggggctgctcctagtacgagaggaccggagtggacgcatcactggtgttcgggttgtcatgccaatggcactgcccggtagctaaatgcggaagagataagtgctgaaagcatctaagcacgaaacttgccccgagatgagttctccctgagacttagagtctcctgaaggaacgttgaagacgacgacgttgataggccgggtgtgtaagcgcagcgatgcgttgagctaaccggtactaatgaaccgtgaggcttaaccttacaacgccgaagatgttttggcggttaagagaagattttcagcactgattcagagttgagtacgcaataatttgcgcagcagcgaggcggcaagcgaaggaaaggaaggagcatacagaagtatgtgactgactttacgagcgcaggcaacgccgctgatgcgataaagaattgcgtacagagcacaaagaatttgcctggcggcactagcgcggtggtcccacctgaccccatgccgaactcagaagtgaaacgccgtagcgccgatggtagtgtggggtctccccatgcgagagtagggaactgccaggcatcaaataaaacgaaaggccctgtcggaagacagggccttttgtttttgtctgtttctgccggatggcggctccgccttatccggcctacagggacgcgccgatctaccctcattataaccacaagccttcccaacacagatacggtaaactattgccgattgagtatcaggaaagcagccatgacccactccctaaaaccctggaataccttcggcattgatcattgtgcaaagcacatcgtatgcgctgaaaacgaacaacaactactgagcgcctggcagcaagcaactcgtgagggactgccggttatgatcctgggtgaaggaagcaatgtcctgtttctggaaaattacgccggcaccgtgatccttaaccgcctgaaaggcattgaggtcaatgaaaccgcggacgcctggcacctacacgtcggcgcaggcgaaaactggcatcagctggttcgctacgcgctggacaacaacatgcccggcctggagaatctggcgctcatccctggctgcgttggttcctcgcctatacagaatattggcgcgtatggcgtagaactacagcgcgtctgcgactacgttgactgcgttgaactggaaacgggaaaacgtctgcgtttgtccgcggcggaatgccgtttcggctatcgtgacagtatcttcaaaaatgaatatcaggatcgcgttgcgatcgtcgcggtgggtctgcgtttgtcaaagcaatggcagccggtgttgacctatggcgatcttacttgtttggacccgaaaacggtcaccgcgcaacaggtgtttgatgctgtatgccatatgcgcaccacaaaattgccggatcctaaagtgaatggcaatgcgggcagcttttttaaaaatcccgttgtcgcagccgatatcgctatggaactgttagaacgatttcccaacgcgccgcattaccctcaggcagacggctcagtgaagctggcggcaggctggctgatagatcaatgtcagttgaaaggcgtcaccattggcggcgctgcggtgcatcgccaacaggcgctggtattgattaatgcgaatgatgcgacaagtaaagatgtggtggcgctggcgcatcatgtccggcaaaaagtgggtgaaaaatttaatgtctggctggagcctgaggttcgctttattggtcggtccggagaggtgaacgctgtggagagcattgcatgaaagatactaccgttcccctgacgctgatctcactacttgccgacggagagtttcactcaggcgagcagttgggtgaacggctgggaatgagccgcgcggctattaataaacatatccagacattacgcgactggggagtagatgtatttaccgttcccgggaaaggatatagcttaccggaacccatccagttactggatgctgaccgtatacatagccaactggatagcggaaacgtggcggtattgcccgttatcgattcaaccaatcagtatttacttgatcgaattggcgagctgcgctcaggcgatgcctgtgtagcagaataccaacaggcggggcgtggtcgtcgcgggcgtaaatggttctcaccgtttggcgcgaatctatatctttcaatgtactggcgtctggagcagggccctgcggcggcaataggcctgagtctggtcattggaattgtgatggcggaagtgctgcgtaaactgggcgcagataaagttcgtgtgaagtggcctaacgacctttacctactggaccgcaaactggcgggtattctggtcgagttaaccggtaaaacgggcgatgccgcacaaatagtgattggcgctggtattaacatggcaatgcgtcgcgtagaagaggacgtgataaatcagggatggatcacactacaagaggccggaattacgctcgaccgcaatatgctggccgcaaagctgatttataagctacgtgctgcgcttgagctttttgagcaagaaggtctttctccttatctttcgcgctggaaaaaactggataattttattgatcgcccggtaaaactaattattggtgacaaagaaatatttggtatttctcgcggcattgatactcaaggcgcattattgcttgaacaggatggcgtgattaaaccctggatgggcggagaaatatcgctgcgaagcgccgaatagtaaaaagggggagtcggtactccccttttttctgttatttccgcaatcttacctgttccaccgcatggttagcgctcttggtcataataaggctggcacgttctcgtgtaggtaagatattttgttttaaattcaaccagttaatttctttccaaagcgaagttgctgtattaacagcttcttctttagataatttcgcataattgtggaaataagagtcaggatcggtaaacgccccttcgcggaatttcaggaagcgattgatataccacgtctgaagaagttcttctggcgcatccacgtaaatagagaaatcaacgaaatcagagacaaatacatgatgcggatcgtgaggataatccataccgctttgtaaaacattcaaaccttcaagaatcaatatatcaggctgagcgacggttttatccccttcaggaataacatcgtaaatcaaatgagaatagactggcgccgtcacgttcggtacgcccgacttgaggtcagaaacgaatttcaccagtcggtgcatatcatacgattcggggaacccctttttcttcattaacccgcgttctttcaacacctggtttgggtggaggaagccgtctgtggtaatcaattcaacacggcggtgttccggccagcgactcagcaacgcttgcagaacgcgtgctgtcgtgcttttacccactgcgacgctgcccgcgatactgatgatgtaagggattcgctggccgttagtgcccagaaactgttccaggacagcctgacgacgcagatttgaactgatatagaaatttagcaaacgggagagaggtaaatatatttctgcaacttcttccagcgataaatcttcattaatgccttttaactgcgcgatctcatcctcggtcagggtcatcggcacagaatcgcgaagcgcagcccactggctgcgatcaaactgtaggtaaggcgtcattaacgattgctcttttatactcataagcatgtttctggctgctattgctacatcagttcagcgatgaacgagggccatccctgacatgcaacggcacgtcacatttaagttaatttggacaatgggcaggagggtaacaccagatggggaggaataataagaaaaaatctcgctgtgaaagctatccctgagaagcaatgtgacgaatataccagatacagaagattgctttctatcgacggagcgttgaaatgccgcgtcgtatcctggtcagacggtcggtaaaatgccgaaaatttatgctctcttgtttgaaattagagcatttttgtctcttatagcgcaaaatgtgagcgatagaacattttatgcaattttttagttgcatgagcacgcaggtctccatagaatgcgcgctacttgatgccgacttagctcagtaggtagagcaactgacttgtaatcagtaggtcaccagttcgattccggtagtcggcaccatcaagtccggtggggttcccgagcggccaaagggagcagactgtaaatctgccgtcacagacttcgaaggttcgaatccttcccccaccaccattttcggccgcgcgatggcgcagcccgagacgataagttcgcttaccggctcgaataaagagagtttctctcgatattcagtgcagaatgaaaatcaggtagccgagttccaggatgcgggcatcgtataatggctattacctcagccttccaagctgatgatgcgggttcgattcccgctgcccgctccaagatgtgctgatatagctcagttggtagagcgcacccttggtaagggtgaggtcggcagttcgaatctgcctatcagcaccacttcttttctccttcctgtttttctcttctgtttattagcattcaacaagtcgggcgtgttgcctggttgatgtggtgatatcaccgatttatccgtgtcttagagggacaatcgatgtctaaagaaaagtttgaacgtacaaaaccgcacgttaacgtcggtactatcggccacgttgaccatggtaaaacaacgctgaccgctgccattactaccgtactggctaaaacctacggcggtgccgctcgcgcattcgaccagatcgataacgcgccggaagaaaaagcgcgtggtatcaccatcaacacttctcacgttgaatacgataccccgacccgccactacgcacacgtagactgcccggggcacgccgactatgttaaaaacatgatcaccggtgctgctcagatggacggcgcgatcctggttgttgctgcgactgacggtccgatgccgcagacccgtgagcacatcctgctgggtcgtcaggtaggcgttccgtacatcatcgtgttcctgaacaaatgcgacatggttgatgacgaagagctgctggaactggttgaaatggaagttcgtgaacttctgtctcagtacgacttcccgggcgacgacacgccgatcgttcgtggttctgctctgaaagcgctggaaggcgacgcagagtgggaagcgaaaatcatcgaactggctggcttcctggattcttacatcccggaaccagagcgtgcgattgacaagccgttcctgctgccgatcgaagacgtattctccatctccggtcgtggtaccgttgttaccggtcgtgtagaacgcggtatcatcaaagtgggcgaagaagttgaaatcgttggtatcaaagagactcagaagtctacctgtactggcgttgaaatgttccgcaaactgctggacgaaggccgtgccggtgagaacgtaggtgttctgctgcgtggtatcaaacgtgaagaaatcgaacgtggtcaggtactggctaagccgggcaccatcaagccgcacaccaagttcgaatctgaagtgtacattctgtccaaagatgaaggcggccgtcatactccgttcttcaaaggctaccgtccgcagttctacttccgtactactgacgtgactggcaccatcgaactgccggaaggcgtagagatggtaatgccgggcgacaacatcaaaatggttgttaccctgatccacccgatcgcgatggacgacggtctgcgtttcgcaatccgtgaaggcggccgtaccgttggcgcgggcgttgttgctaaagttctcggctaatcgctgataacatttgacgcaatgcgcaataaaagggcatcatttgatgccctttttgcacgctttcacaccagaacctggctcatcagtgattttatttgtcataatcattgctgagacaggctctgtagagggcgtataatccgaaaggcgaataagcgtttcgatttggattgcctcgcgattgcggggtgaaaatgtttgtagaatacttctgacaggttggtttatgagtgcgaataccgaagctcaagggagcgggcgcggcctggaagcgatgaagtggatagttgttgccatattgctgatcgtcgcaatcgtcggcaactacctctatcgcgacatgatgctgccgctgcgtgcgctggccgtagtaattctgattgctgcagcgggtggtgtcgcgctgttgacgacaaaaggtaaagcaaccgttgcttttgcccgtgaagcgagaaccgaagtccgtaaggtcatttggccgactcgccaggaaacgctgcacaccacgctgatcgtcgctgcggttaccgcagttatgtcactgatcctgtggggactggatggtattctggttcgcctggtatcctttatcactggcctgaggttctgagatgtctgaagcacctaaaaagcgctggtacgtcgttcaggcgttttccggttttgaaggccgcgtagccacatcgctgcgcgagcatatcaaattacacaatatggaagagctgtttggcgaagtcatggtgccgactgaagaagtcgttgagatccgtggcggccagcgtcgcaaaagcgaacgcaaattcttcccgggttacgttctggtccagatggtcatgaacgacgcaagctggcacctggtgcgcagcgtgccgcgtgtgatgggctttatcggcggtacctctgaccgtccggcgccgatcagcgacaaagaagtcgatgcgatcatgaaccgcctgcagcaggttggcgataagccgcggccgaaaactctgtttgaaccgggtgaaatggttcgtgttaacgacggtccgttcgcagactttaacggcgttgtcgaagaagtcgattatgagaagtctcgcctgaaagtgtctgtttctatcttcggtcgtgcgaccccggtagagctggacttcagtcaggttgagaaagcgtaaggctgcgatcaaaaaagcagcgatctaatcgttgcatagggcgcgaaattgacatacaatttcgcgccttttgtttttatgggccttatgcccataaagcgatatttatcacggggagcttctttgaagcgatactacccaattcgaggaatttagaatggctaagaaagtacaagcctacgtcaagctgcaggttgcagctggtatggcgaacccgagtccgccggttggtccagcactgggtcagcagggtgtgaacatcatggaattctgcaaagcgttcaacgcaaaaacggattccatcgaaaaaggtctgccgattccggttgttattaccgtttacgctgaccgttctttcaccttcgttaccaaaacgcctccggcagctgttctgctgaaaaaagcggctggtatcaagtctggttccggcaagccgaacaaagacaaagtaggtaaaatttcccgcgctcagctgcaggaaatcgcgcagaccaaagctgccgacatgaccggtgccgacattgaagcgatgactcgctccatcgaaggtactgcacgttccatgggcctggtagtggaggactaagaaatggctaaactgaccaagcgtatgcgcgtgatccgtgaaaaagttgatgcgaccaaacagtacgacatcaacgaagctattgccctgctgaaagagctggccactgctaaattcaacgaaagcgttgacgttgccgttaacctcggcatcgacgctcgtaaatctgaccagaacgttcgtggcgcgactgtactgccgcacggtactggccgttctgttcgcgttgccgtatttacccaaggcccgaacgctgaagcagctaaagctgctggcgctgagctggtaggtatggaagatctggctgaccagatcaagaaaggcgaaatgaacttcgacgttgttatcgcatccccggatgcaatgcgcgttgttggccagctgggccaggttctgggtccgcgcggcctgatgccaaacccgaaagtcggtaccgtaactccgaacgttgctgaagcggttaagaacgctaaagcaggtcaggttcgttaccgtaacgacaaaaacggcatcatccacaccaccatcggtaaagtggactttgacgctgacaaactgaaagaaaacctggaagctctgctggttgcgctgaaaaaagcaaaaccgagccaggcgaaaggcgtgtacatcaagaaagttagcatctccaccaccatgggtgctggcgttgccgttgatcaggctggtctgagcgcatctgcgaactaagattagtctttacgtgggcggtgattttgtctacaatcttacccccacgattctgttgaaatataacagagcactatgcgagtcatttgaattgcagcaaggcagcaagtgagtgagtcgccaggagcatagttaactatgtgactggtgtgaacgagcgcagctaacacagctgcggttcaaaggacgaagtcatagaaagaatttgttcgttggagcctggcctatccaggcctccgtcgaagaccgcaggcgtctcgcaagaggcttaatcccctgcgtagacggtgacagaacgctaagattattttttatactctggcttgtttctgctcaccgtattaagacgctcttctcgttgagatgagtgaagtgagttccggaacatgagttccggcaaacatccaggagcaaagctaatggctttaaatcttcaagacaaacaagcgattgttgctgaagtcagcgaagtagccaaaggcgcgctgtctgcagtagttgcggattcccgtggcgtaactgtagataaaatgactgaactgcgtaaagcaggtcgtgaagctggcgtatacatgcgtgttgttcgtaacaccctgctgcgccgcgtcgttgaaggtactcagttcgagtgcctgaaagacacgtttgttggtccgaccctgattgcatactctatggaacacccgggcgctgctgctcgtctgttcaaagagttcgcgaaagcgaatgcaaaatttgaggtcaaagctgcagcctttgaaggtgagctgatcccggcgtctcagatcgaccgcctggcaactctgccgacctacgaagaagcaattgcacgcctgatggcaaccatgaaagaagcttcggctggcaaactggttcgcacactggctgctgtacgcgatgcaaaagaagctgcgtaatcgcagttgtctttatcaagcatttgcttacgtataaacttattctgatattcaggaacaatttaaatgtctatcactaaagatcaaatcattgaagcagtatccgctatgtccgtaatggacgttgtagaactgatttctgcaatggaagaaaaattcggtgtttccgctgctgctgctgtagctgtagctgctggcccggctgaagctgctgaagaaaaaactgaattcgacgtaattctgaaagctgctggcgctaacaaagttgctgttatcaaagcagtacgtggcgcaactggcctgggtctgaaagaagctaaagacctggtagaatctgctccggccgctctgaaagaaggcgtgagcaaagatgacgctgaagcactgaaaaaatctctggaagaagctggcgctgaagttgaagttaaataagccaacccttccggttgcagcctgagaaatcaggctgatggctggtgactttttagtcaccagcctttttgcgctgtaaggcgccagtagcgtttcacactgtttgactactgctgtgcctttcaatgcttgtttctatcgacgacttaatatactgcgacagagcgtacgttctgtgtaaatcgcaatgaaatggtttaagcgtgatagcaacaggcattgcggaaagtatccattttccggtcaacaaaatagtgttgcacaaactgtcccccgcaggacagatgggtcgacttgtcagcgagctgaggaaccctatggtttactcctataccgagaaaaaacgtattcgtaaggattttggtaaacgtccacaagttctggatgtaccttatctcctttctatccagcttgactcgtttcagaagtttatcgagcaagatcctgaagggcagtacggcctggaagcagccttccgttccgtgttcccgattcagagctacagcggtaattccgagctgcagtacgtcagctaccgccttggcgaaccggtgtttgacgttcaggaatgtcagatccgtggcgtgacctattccgcaccgctgcgcgtaaaactgcgtctggtgatctacgagcgcgaagcgccggaaggcaccgtaaaagacattaaagaacaagaagtctacatgggcgaaattccgctcatgaccgacaacggtacctttgttatcaacggtactgagcgtgttatcgtttctcagctgcaccgtagccctggcgtcttctttgactccgacaaaggtaaaacccactcttcgggtaaagtgctgtataacgcgcgcatcattccttaccgtggttcctggctggacttcgaattcgatccgaaggacaacctgttcgtacgtatcgaccgtcgccgtaaactgcctgcgaccatcatcctgcgtgcgctgaactacaccactgagcagatccttgacctgttctttgagaaagtcgtcttcgaaattcgcgacaacaaactgcagatggagctgattccagaacgtctgcgtggcgaaaccgcgtcgttcgatatcgaagctaacggcaaagtgtacgttgaaaaaggccgtcgcattaccgcgcgtcacatccgtcagctggaaaaagacgatatcaagcatatcgaagttccggttgagtacatcgcaggtaaagtcgtctctaaagactacgttgacgaatctactggcgagctgatctgcgcggcgaacatggagctgagcctggatctgctggctaagctgagccagtccggccacaagcgtatcgaaacgctgtttaccaacgatctggaccacggcccgtacatttctgaaacggtacgcgtcgacccaactaacgatcgtctgagcgcgctggtagaaatctaccgcatgatgcgccctggtgagccgccgacacgcgaagcggctgaaagcctgtttgagaacctgttcttctccgaagaccgctatgacctgtctgcggtgggtcgtatgaagttcaaccgttctctgctgcgcgacgaaatcgaaggttccggtatcctgagcaaagacgacatcattgatgtcatgaagaagctcatcgatatccgtaacggtaaaggcgaagtggatgatatcgaccacctcggcaaccgtcgtatccgttccgtcggcgaaatggcggaaaaccagttccgcgttggcctggtgcgtgtagagcgtgcggtgaaagagcgtctgtctctgggcgatctggataccctgatgcctcaggatatgatcaacgccaagccgatttccgccgcagtgaaagagttctttggttccagccagctgtctcagtttatggaccagaacaacccgctgtctgagattacgcacaaacgtcgtatctccgcactcggcccaggcggtctgacccgcgaacgcgcaggcttcgaagttcgagacgtacacccgacgcactacggtcgcgtatgtcctatcgaaacgccggaaggtccgaacatcggtctgatcaactccctgtccgtgtacgcacagactaacgaatatggcttccttgagacgccgtaccgtcgtgtggttgatggcgtggttactgacgaaattcattacctgtctgctatcgaagaaggcaactacgttatcgctcaggcgaactccaacctggatgacgaaggccactttgtagaagatttggtgacctgccgtagcaaaggcgaatccagcttgttcagccgcgaccaggttgactacatggacgtttccacccagcaggtggtctccgtcggtgcgtccctgatcccgttcctggaacacgatgacgccaaccgtgcattgatgggtgcgaacatgcaacgtcaggcggttccgactctgcgcgctgacaagccgctggtgggtaccggtatggaacgtgctgtcgccgtcgactccggtgttactgcagtagctaaacgtggcggtactgttcagtacgtggatgcgtcccgtatcgttatcaaagttaacgaagacgagatgtacccgggcgaagcgggtatcgacatctataacctgaccaaatacacccgctctaaccagaacacctgtatcaaccagatgccatgtgtgtctctgggcgagccggttgaacgcggcgacgtgctggcagacggtccgtccaccgacctcggtgaactggcgctcggtcagaacatgcgcgtggcgttcatgccgtggaacggctacaacttcgaagactccattctcgtttccgagcgtgttgtccaggaagaccgtttcaccaccatccacattcaggaactggcgtgcgtgtcccgtgacaccaagctggggccggaagagatcaccgctgatatcccgaacgtgggtgaagctgcgctctccaaactggatgaatccggtatcgtttacatcggcgcggaagtgacaggcggtgacattctggtcggtaaggtgacgccgaaaggtgaaacccagctgacgccggaagagaaactgctgcgtgcgatcttcggtgagaaagcgtctgacgttaaagactcttctctgcgcgtacctaacggtgtctccggtacggttatcgacgttcaggtctttactcgcgatggcgtagaaaaagacaaacgtgctctggaaatcgaagagatgcagctcaagcaggcgaaaaaagacctgtctgaagaactgcagatcctcgaagcgggcctgtttagccgtatccgtgcggtgctggtttccagcggcgttgaagctgagaagctcgacaaactgccgcgcgaccgctggctggaactcggtctgaccgacgaagagaaacaaaatcagctggaacaactggctgagcagtatgacgaactgaaacacgagttcgagaaaaaacttgaagcgaagcgccgtaaaatcacccagggcgacgatctggcgccgggcgtgctgaagatcgtgaaggtctatctggccgttaaacgccgtatccagccgggtgataagatggcaggtcgtcacggtaacaagggtgttatctctaagatcaacccgatcgaagacatgccttacgatgaaaacggcacgccggtagacatcgtactgaacccgctgggcgtaccgtctcgtatgaacatcggccagattctggaaacccacctgggtatggctgcgaaaggtattggcgacaagattaacgccatgctgaaacagcagcaggaagtcgcgaaactgcgcgaattcatccagcgtgcctacgatctgggcgccgacgttcgtcagaaagtcgacctgagcaccttcagcgatgatgaagtgctgcgtctggcagaaaacctgcgtaaaggtatgccgattgccacaccagtgtttgacggtgcgaaagaagcggaaatcaaagagctgctgaaactgggcgacctgccgacctccggtcagatcaccctgttcgatggccgtacgggtgaacagttcgaacgtccggtaaccgtcggttacatgtacatgctgaaactgaaccacctggttgatgacaagatgcatgcgcgttctaccggttcttacagcctggttactcagcagccgctgggtggtaaggcgcagttcggtggtcagcgcttcggggagatggaagtgtgggcgctggaagcttacggcgccgcctacaccctgcaggaaatgctcaccgttaagtctgatgacgtgaatggtcgtaccaagatgtataagaacatcgtggacggcaaccatcagatggaaccgggtatgccggaatccttcaacgttctgttgaaagagatccgctcgctgggcatcaacatcgaactggaagacgagtaattctcgctcaaacaggtcactggtgtcggggtaaaacccgacaccagattgtgctaactccgacgggagcaaatccgtgaaagatttattaaagtttctgaaagcgcagactaaaaccgaagagtttgatgcgatcaaaattgctctggcttcgccagacatgatccgttcatggtctttcggtgaagttaaaaagccggaaaccatcaactaccgtacgttcaaacctgagcgtgacggccttttctgcgcccgtatctttgggccggtaaaagactacgagtgcctgtgcggtaagtacaagcgcctgaaacatcgtggtgttatttgtgagaagtgcggcgttgaagtgacccagaccaaagtacgccgtgagcgtatgggccacatcgagctagcgtccccgactgctcacatctggttcctgaaatcgctgccgtcccgtatcggtctgctgctcgatatgccgctgcgcgatatcgaacgcgtactgtacttcgaatcttatgtggttatcgaaggcggtatgaccaacctggaacgtcaacagatcctgactgaagagcagtatctggacgcgctggaagagttcggtgacgaattcgacgcgaagatgggggcggaagctatccaggccctgctgaagagcatggatctggagcaagagtgtgaaactctgcgcgaagagctgaacgaaaccaactccgaaaccaagcgtaaaaagctgaccaagcgtatcaaactgctggaagccttcgttcagtctggcaacaagccagagtggatgatcctgaccgttctgccggttctgccgccagatctgcgtccgctggttccgctggatggtggtcgtttcgccacgtcagatctgaacgatctgtatcgtcgcgtcattaaccgtaacaaccgtctgaagcgtctgctggatctggctgcgccggacatcatcgtacgcaacgaaaaacgtatgctgcaggaagcggttgacgccctgttggataacggtcgtcgcggtcgtgcgatcaccggttctaacaagcgtcctctgaaatctttggccgacatgatcaaaggtaagcagggtcgtttccgtcagaacctgctcggtaagcgtgttgactactccggtcgttctgtaatcaccgtaggtccatacctgcgtctgcaccagtgcggtctgccgaagaaaatggcgctggagctgttcaaaccgttcatctacggcaagctggaactgcgtggccttgccaccaccatcaaagccgcgaagaaaatggttgagcgtgaagaagctgtcgtttgggatatccttgacgaagttatccgcgaacacccggtactgctgaaccgtgcaccgactctgcaccgtctgggtatccaggcatttgaaccggtactgatcgaaggtaaagctatccagctgcacccgctggtttgtgcggcatataacgccgacttcgatggtgaccagatggctgttcacgtaccgctgacgctggaagcccagcttgaagcgcgtgcgctgatgatgtctaccaacaacatcctgtctccggcgaacggcgaacctatcatcgttccgtctcaggacgtggtattgggtctgtactacatgacccgtgactgtgttaacgccaaaggcgaaggcatggtgctgactggcccgaaagaagctgagcgtatctatcgcgcaggtctggcctctctgcatgcgcgcgttaaagtgcgtatcactgaatatgaaaaagatgaaaacggcgaattcgttgcgcacaccagcctgaaagacacgaccgttggtcgcgccattctgtggatgatcgtaccgaaaggtctgcctttctccatcgtcaaccaggcgctgggcaagaaagcgatctccaaaatgctgaacacttgctaccgtattctgggcctgaaaccgaccgttatttttgcggaccagacgatgtacaccggctttgcttatgcagcgcgttcaggtgcgtccgttggtattgatgacatggtcatcccggagaaaaaacacgagatcatctctgaggcggaagctgaagttgctgagatccaggagcagttccagtctggtctggtaaccgctggcgaacgctataacaaagttatcgatatctgggctgcggcgaacgatcgtgtatctaaagcgatgatggataacctgcaaaccgaaaccgtgattaaccgtgacggccaggaagagcagcaggtttccttcaacagcatctacatgatggccgactccggtgcgcgtggttctgcggcacagattcgtcagcttgctggtatgcgtggtctgatggcgaagccggatggctccatcatcgaaacgccaatcaccgcgaacttccgtgaaggtctgaacgtactccagtacttcatctccacccacggtgcgcgtaaaggtctggcggataccgcactgaaaaccgcgaactccggttacctgactcgtcgtctggttgacgtcgcgcaggatctggtagtgaccgaagatgactgtggtacgcacgaaggtatcctgatgaccccggttatcgagggtggcgacgtgaaagagccgctgcgtgaccgcgttctgggtcgtgtgacggcggaagatgtgctgaaaccgggtaccgcggacattctggttccacgcaacacgctgctgcacgaacagtggtgtgacctgctggaagcaaactccgttgacgccgttaaagtgcgttctgttgtatcctgcgacaccgactttggtgtatgtgcgcactgctatggccgtgacctggcgcgtggccacatcatcaacaaaggtgaagctatcggcgttatcgcggcacagtccatcggtgaaccgggtacacagctgacgatgcgtacgttccacatcggtggtgcggcatcgcgtgcggctgctgaatccagcatccaggttaagaacaaaggtagcatcaagctcagcaacgtgaagtcggttgtgaactccagcggtaaactggttatcacttctcgtaacaccgaactgaagctgatcgacgaattcggtcgtaccaaagagagctataaagtgccttatggcgctgtcatggcgaaaggtgatggcgagcaggttgccggcggcgaaaccgtggcaaactgggacccgcacaccatgccggttatcaccgaagtgagtggtttcatccgcttcactgacatgatcgacggtcagaccattacgcgtcagaccgacgaactgaccggtttgtcttcgctggtggttctggattcggctgaacgtactaccggtggtaaagatctgcgtccggcgctgaaaatcgttgatgctcagggtaatgacgttctgatcccgggtaccgatatgcctgcgcagtacttcctgccgggtaaagcgattgtacagctggaagatggcgtacagatcagttctggtgacaccctggcgcgtattcctcaggaatccggcggtaccaaggatatcaccggtggtctgccgcgcgttgcggacctgttcgaagcgcgtcgtccgaaagaaccggccattctggcggaaatcgcaggtatcgtttccttcggtaaagaaaccaaaggcaaacgtcgtctggtgattacgccggttgatggtagcgatccgtacgaagagatgattccgaaatggcgtcagctcaacgtgttcgaaggggaacgtgtagaacgtggtgatgtgatttccgacggtccggaagcgccgcacgatattctgcgtctgcgtggtgttcatgctgtgacgcgttacatcgttaacgaagtccaggatgtataccgtctgcagggcgttaagattaacgataaacacatcgaagttatcgttcgtcagatgctgcgtaaagcgaccatcgaaagcgccggtagttccgacttcctggaaggcgaacaggttgaatattcccgcgtcaagatcgctaaccgcgagctggaagcgaacggcaaagtgggggctaccttctcccgcgatctgctgggtatcaccaaagcgtctctggcaaccgaatcgttcatctctgccgcatcgttccaggagaccacgcgtgtcctgaccgaagcagccgttgcgggtaaacgcgacgaactgcgcggcctgaaagagaacgttatcgtggggcgtctgatcccggcgggtaccggttatgcgtaccaccaggatcgtatgcgccgtcgcgccgcgggcgagcagccagcaacaccgcaggtcactgcggaagatgcatctgcaagcctggcagaactgctgaacgcaggtctgggcggttctgataacgagtaatcgttaaatggtggaggggtatttatccctccaccagcttcatgctggataccgaattccgggtcgcttgcctacaaggaaagaaaatgccagcgattatttcattaatctatttaatgtttagtcttttagtatttacaaaaaagataaccatttcaaacgttctgtccgcttttttattgtttctatcgttatatatacttcaccataaatcattacttatatttatttattgtcttattattattgtcgccaccgctattcttcatcgagtcaaaaccagcgcggataaaaaagccgtattttatttttcaatgccatgctggctcttggttttatctgtaattataaatattaatgaataaatgaattattttttcatgactcttgtttctcgtattattggtgaaaaatcattatcactggttatatgaataaattgtccagtttttgtattatattttgccatcgcacagggaagactattaccaccgttagccataacaaattttgcttttgtattacgataaagattgacgccaggaatggggtcttgaccgaatgtataaggcgttgggacaattacattatgtttgtttgagagccactttactaaaatcccgccaacgccatcaaccggcgtaataaaagtagagaatccacaatactcaaaattgaaattttttatcattgggtttgtttttttctgtaacattgattccaaatgtgactttaaatttatcccataaatctaagttattaaagtctattggctcgccattataaaatacctgctgttcatacattaaatgataaacctgttttattgattgtttacgcgggacattttaaattattaaatgaaggatttaattccattaaggtctttgtttgctcttattacaggaattataaatatgatgccatttctggaataaaagtaaagttaataaattatttatttaattgctcactggcagggtatttatgtatcctccggttaatgcttagtttagcatcttttagctgacagcgattgcaacgctaaaaaacatgtgctaataatcatcatgtaaaatatgtaatgaagtaagtatggagcatttaattgttatgatcccaccattaaatagatatgttcccgcgctttcaaaaaatgaattggttaaaactgttaccaacagggacattcagtttacaagttttaatggaaaagattatcccttgtgctttttagatgagaaaacccctcttcttttccagtggtttgagcggaatcctgctcgctttgggaaaaatgatatacctataattaacacagagaaaaacccctaccttaacaatatcattaaagcagcaacaattgaaaaagaacgtcttataggtatttttgtagatggtgatttttttccgggacaaaaggatgctttttcaaaacttgagtatgactatgaaaacataaaagtcatatatagaaatgatattgactttagtatgtacgataaaaaattatcagaaatttatatggaaaatatttctaagcaagagtccatgccagaagaaaaaagggattgtcatttactgcagctattgaaaaaagaattgagtgatattcaagagggtaatgattcattaattaaatcttacttactggataaaggccatggatggtttgatttttacaggaatatggctatgttaaaggctggtcagttatttttggaggcggataaggttgggtgttatgatttatcaacaaatagtgggtgtatatatcttgatgctgatatgattatcacggaaaaactggggggtatatatattccggatggaatcgctgttcatgtagaaaggatagatggccgtgcttctatggaaaacgggataatagctgttgatcgcaataaccacccggctttacttgctggattagaaataatgcatactaaatttgatgctgatccctattctgatggtgtatgtaatggaattagaaaacattttaattattctttaaatgaagattataattctttttgcgattttattgagtttaagcatgataacattataatgaataccagtcagtttacgcaaagttcatgggcgaggcatgtgcagtagcggaaatggcaataatcatgctattgaatacataaaatattggcataaactatcaagtttcggcgaaaaatatttgttgctcagttttctctactacaacgccactttaaaatcgcagtgctgttcagaacggagatatacggcattccttgtgaaatatgggagtaagaagagcttaaataatttaattggttattaaataacaattttatttatacagatatctgtcagattacatctggcttaaatttttgtcagcccagatgcgttttccatcaagtaacgttaccatcggcgtccggccgcaacacatttttccctgatgggttcgcccctgattcccgttgttctggggcatcattttatggacaaaaacgatcagcagacacggttggaagaggggccgccagcgaaattacagtcaggaacgctgcccgaaaacttcaagttcaccgctatttcgataatccagtggccagcccccggtcgtcagttactgatgaaggggtgaaggctgggcaataatgaggaagggatactttgccttggtcagcttccgttgctgacgatgacaaaataaaaaaacgggaggtcgataacaatctcccgtttttcgcattacgtactcgttcgtgaaatactaatgcgtttacatacgggttcaccgcgtttgcgaagcgcgccccagccaactgtcccagtctttccagacgggctgcaatccttgcgcgcttaacgcgcttgctactgtttcaggccgacgggcatcgtggggagaaaactgctccagttccggatgatcgtcagcgtagccgccgggctgcgtttttgagaaggcgctgacgttgttgattgccagcggaatcacatggtctcgaaaccacggcgattcgcgggtggagagtgataattcaatttccggcgccaataaccggaaagcgcaaatcgtttgcaccagttgcttttcatccatcacagatgcgggttccacaccgccagtacacggacgcagacgcgggaaggaaacagaatagcgactctgccagtagtgtttctgcatccacaacagatgctccgccaccatatagcaatccacccgccagttgtccgacagaccaattagcgcgccaagaccgattttgtcgatacctgcccggcctaaccgatccggcgtttccagccgccagaaaaagtcctgtttctttcccttcaggtgatgctgtgcatagattgcctcatgataagtctcctgataaaccatcacgccatcgatccccagtgttttgagctccgcatagttttcttgcgacaagggctggacttccatctgtaaagaggaaaattgacggcggatggtgggtaaatgacggcgaaaatagtccatgccgactttggcctgatgttcgccggtgactaacagcagatgctcaaagcccagtttacggatagcatcgcattccctttgaatatccacctcatccagcgttttacgcttaatgcggttgctcatcgaaaaaccgcagtaggtacagtcgttggcacagaggtttgagagataaagcggcacgtagaaactgacggtgttgccaaagcgttgtcgggtcagcctttgcgcccgctgcgctatcggttccagataatcggcggcggcgggggagagcagtgccatcaaatcatcccggctaagatgcgcggcgttcagcgcacgttccacgtcagcggcggttttaccattgatgcgcaggcgaatatcgtcccactccagttgccgccaacggtcggtgaaggttttcatgctaacgcctccagaaatccggtgagcgggctggtggcgttggcgtaggtgctacgattacccggcaccgcctgacgcgccagtactcccgcttctacagccaggcggaaagcggttgccatcattaccggatcgtccgccacggcaatcgccgtgttgaccagcaccgcatcagcgcccatttccagcgcctgcgccgcatggctgggcactccaatgcccgcatcaaccaccaccggcacggtggactgctggataataatctccagcatcgctttggtttccagcccctgattcgaaccgataggcgcgccgagcggcatcaccgccgcgcagccgacctcttccagccgcttgcacaacaccggatccgcgccgcagtagggcagcaccacaaaaccctgcttcaccagcgcctcggcggcttttagcgtttcgatcggatccggcagcagccagcgggcgtccggatggatttctaatttcagccagtgggttcccagcgcttcgcgcgccagttgggcggcgaagattgcctcttcggcggttttcgccccggaggtattgggcagcagcgtgacgcccgcttcaatcagcggcgccaggatagcgtcgttgtgctgacgtaaatccacgcgcttcatcgccagtgtcaccaactggctgccggaggcgcgaattgcctcgaccatcagttgcgatgaggcaaacttcccggtaccggtgaacagatgtgaatcaaacgttttgtcggcaatacgtaacatatcaaccccctgcaataacctgaaaaaacaggatctggtcgccttcctgcacgatttgctgctgccactgctcgcgcggcaggatctgctgattgagcgccagcgccgcgcccggtttaagctgattgagttgcgtgagcagctcactgacggtttgccctgcggcgcactgcatcggttcatcattgaactgaatctgcatgttgccctccgcagaccggacagccgctggcatgacgcagcgccaggctgcgccactggctggttttgccgtcaaacaggcgtagctctccgctgggcgtctcaataccgctgagtaatttgattgcctccagcgcctgcaaggtgcccatcacgccaacaaccggtccgacgataccggcggtacggcagttgcgttcaggctcgacatcgtccggccacaggcagcggtaacagccttgttcccacggtggtgtgaggaccattagctggccgccaaagccgacggcgctggcggaaattaacggagtgttgagcgccacacaggcggcgttaatctcctggcgcgtcgccatgttatcggtacagtcgagcactacgtcggcgtgtgctaccgcgtttttaagcacatcgccagtcagacgttgttgcaatacgatcagcttgctaccggggttgagctgcgccagccgtagttttgccgcctgcgccttcgggtgggcgatatcgtcggtggtgaacagaatttgccgctggagattgctcaagtgaacatcgtcatcgtctaccagcgttagtttgccgatgcctgctcccgccagatacagcgcggcaggcgaacccaatccgcctaagccgacaatcaatacatggctattgagcaacttttgctggccttcaatcgcgatatcgccgagcaggatctggcggctataacgcataaaatcatggtcattcatcgccgactcctgcgattgccagcagctctgcagtggcttcacgccagtctgcggcctgagtaatagcgctgaccacggcaatgctgccgacgccggtcgccagtaccgccggagcgcgttcaaggctgatgccgccaattgccacggtcgggtaatccgccagtcgttcaatatgactggccagctgcgccagcccctgcggggcggaaggcatctgcttggtttgcgtggggaagacatgacccagcgcgatataagaaggcttagcggcgagcgcgacgtctatctccatatcatcgtgggtcgatacgcccaggcgtaagcccgccgcttgaatcgctttcaggtcggtggtttcaaggtcttcctggcccagatgcacgccgtaagcgcggtgcttaattgccagacgccagtaatcgttgataaacagccgggcgttataacgacgccccagcgcgatggcggcgataacgtcggcttccacctcttcatcgcgtttatctttgatacgcaactggatcgtgcgcacgcccgactccagtaaacgctcaatccattcaacgctgtccaccaccgggtaaagcccgaggcggaacggcacggtggggaaatcaggctgatacatcaggcttcctcccgcttgagataaatttcgccgcctttggcgcggaagtcctctgacatatccgccatgccgatttcaatagtttgtgcggcggcgtagtcgcggacctcctggctgattttcatcgagcagaacttcggcccgcacatggagcagaagtgggcaaccttgccggactcctgcggcagggtttcatcgtgataagcgcgggcggtgaacgggtcgagcgcgaggttaaactgatcttcccagcggaattcaaagcgcgctttcgacatggcgttatcgcggatctgcgcgcccggatgtcctttggctaaatccgcggcgtgggcggcgattttgtaggtgattagcccctgcttcacatcttctttgttcggcaggccgaggtgttctttcggcgtcacataacacagcatcgcgcagccaaaccagccgatcatcgcggcaccgatcccggaggtgaagtggtcatagcccggcgcgatatcggtggtcaatggccctaaggtgtagaacggtgcttcatggcagctctccagctcttcggtcatgttgcgctggatcatatgcatgggtacgtggcccgggccttcaatcatcacctgcacgtcgtattcccaggcgattttggtcaattcgcccagcgtatgcagctcggagaactgcgcttcgtcgttggcatcctgaatggagccggggcgcaggccgtcgcccagcgacaaggagacgtcgtaggcggcgcaaatttcacaaatctcgcggaaatgttcgaacaggaagttctctttgtgatgggagagacaccactttgccatgatggaaccgccgcgtgagacaatcccggtcaggcgtttggcggtcattggcacgtagcgcagcagcacgcccgcgtgaatggtgaagtagtcgacgccctgttcagcctgctccagtagcgtgtcgcggaacgcttcccaggtaagatcttcggcgatcccgttgaccttctccagcgcctggtagatcgggacggtgccgatcggtaccgggctgttacgcaggatccattcgcgggtttcatgaatatagcgaccggtggagaggtccatcaccgtgtccgcgccccagcgggttgaccacaccagtttttccacctcttcttcgatggaggaggtgaccgccgagttaccgatgttggcattcactttgaccaggaagttgcggccgataatcatcggctccgattccgggtggttgatgttggcgggaataatcgcgcggcccgcggcgacttcatcacgcacgaattccggcgtaatgttttccggcaggcgcgcgccaaagttcatccccggatgctggtggcgcagcacttcactgcgaatgcgctcacggcccatattttcacggatggcgatgaactccatttcgggagtgacgatccccttgcgggcgtagtgtaactgggtgacgcgcttgcccgctttagcgcgttttggcgtcagcaggccggtaaaacgcagatcgtccaggccatcgtcggccagacgttctctggtataagccgagctacggtcgtctaattcttcgctatcgttacgtgcgtcaatccatggctggcgcagtttcgccagaccctgctggacgttaatcgccacctcaggatcgccataggggccggaggtgtcgtataccggtacggcttcgttctcttcaaactgcgggttgtctttactgccgccgatgagcgtggggctaagttgaatttcgcgcatcggtacgcgaatatcatgctgcgaaccggtcacgtagatgcgtttcgagttgggaaacgcggtgccttccagcgtatcgataaaatgctgggctttagcgcgctgctcgcggcgggttaacgttgttgtagacatagctcattccaaaaaattaaggacgtggcttgtcagacgacggatggagtaatggatgtgcgccgcccgtaaaggcagcagcataaagcagaattactcttgttcccttcgcaggtattaacctgatcaggttccgcggatcccgaattaacggtctcagccttttccacttcatccttcgcgctgcctcttcgttggcttcgtccgctcactccagtcacttacttatgtaagctcctggagattcaccgacttgccgccttgacgcatcacgaacgcttttgtggaaaattagcactccgacaagataaccgcccctccgaagagggggctgaagtaaactacccgttactcgcgcagaactcaagcgggacgtttgactctggcgccgtcgtgcatcgcgtcaaacaccagcataatcagcttgtcttccagcacaaagcgggcttccagcgcttcgccgatatctgacagagcttgttgaaattcgagacaattatcgtgatcgatggcagtttccaggctggtgtcgtaataatccataatgcgctgcgtattatcttccagcagcggccagatttttgccgcatgtaaaagctgaccgtttccttccaatttatggagaatacgttcataaatactgaagtgcccggcggaaaggtaatcgaccaggctctgacaaaaatcatccagcgctttttcattcagccgcatgtacgattctttgccaggcttaatgccaaccagattgtagtaagccacgagcaggtgcttacgtacatccagccagcgatcgaccagtttgttgcttccgccaacgcgctccgtcaggttttccagctggtttagcatgattgtctccgcaagttagataaaggctgctcgccatgaatgtaaaaataatgttaacaacatgccagtgaagcaaaggtagtgcaatagctatggatcgtataattgaaaaattagagagtggctggtggatcgtcagccatgaacaaaaattatggttgccgtatggggaattaccacacgggctggcggcaaatttcgatcttgtggggcagcgcgcactccggataggtgaatggcaaggcgagcccgtttggctggtgttacagcatcgacgtcatgatatgggatcggttcgccaggttatcgatcaggaggccgggttgttccaactggcgggacgtggcgtacagttggcggagttttatcgttcgcataaattttgcggctattgcgggcaccctatgcacccgagtaaaaccgaatgggcgatgctgtgcagccattgccgcgagcgttactacccgcaaatcgccccctgcattattgttgccattcgccgtgaggattccatcctgctggcccagcacgttcgccaccgcaacggcgtgcataccgtgctggccgggtttgttgaagtcggcgaaaccttagaacaggcggtcgcgcgagaggtaatggaggagagcgggattaaggtgaaaaatctgcgctatgtgacttcccagccgtggcctttcccgcagtcgttgatgaccgcttttatggcggagtatgacagcggcgagattgtcatcgacccgaaagaactgttggaagcaaattggtaccgttatgacgatctgccgctactaccgccaccgggcaccgtcgcgcgccgtttgatcgaagatacggtggcaatgtgtcgggctgaatatgattgacatgttacactgggcgcatcaacgctaaaggaatgtaaaaatgaccgaactcaaaaacgatcgttatctacgtgcgctgctgcgccagcccgttgatgttacgccagtgtggatgatgcgccaggcgggccgttatctaccggagtacaaagccactcgcgctcaggcgggcgattttatgtcgctgtgcaaaaatgccgaactggcctgcgaggtcactttacagccgctgcgccgttatccgcttgatgcggcgatccttttctcggatatcctgacgattccggacgcgatgggcctggggctctattttgaagctggggaaggcccgcgctttacagcccctgtcacctgcaaagccgacgttgaaaaactgccgattccggatccagaaggtgaactgggctacgtgatgaatgcggtgcgtacgattcgccgcgaactaaaaggcgaggttcctctgatcggcttctccggcagcccgtggacgctggcgacttacatggtggaaggcggcagtagcaaagccttcacggtgattaaaaagatgatgtacgctgacccgcaggcgttgcatctgctgctggataagttggcgaaaagcgtcacgctgtacctcaacgcgcagattaaagcgggtgcgcagtcggtgatgattttcgatacctggggcggcgtgctgactggccgcgattaccagcaattctccctctactacatgcataaaatcgtcgatggcctgctgcgtgaaaacgacggtcgccgggtgccggtaacgctgttcactaaaggtggcggtcagtggctggaggcgatggcggaaaccggctgcgacgcgctgggtctcgactggacgacagatatcgccgatgcgcgccgtcgcgttggccataaagtggcgctgcagggcaatatggacccctcgatgctgtatgcgccgccggcacggatcgaagacgaagtagcgactatacttgctggtttcggtcagggagaagggcacgtctttaaccttggacatggcatccatcaggatgtgccgccagaacatgctggcgcatttgtggaggcagtgcaccgactttctgcgcagtatcacaactaaggagttagcatggatctcgcgtcgctacgcgctcaacagatagaacttgcttcatcggtttgccgcgaagatcggttggacaaagatccgccagcgtttatcggcggggcggacgtcggttttgagcagggcggcgaggtgacgcgggcggcgatggtattgctgaaatatccgtcgcttgaactggtagagtacaaggtggcgcgtattgccaccaccatgccgtatatccccggctttctctcttttcgtgaatatcctgcgctgctggcggcgtgggaacagctctcgcaaaagcccgatttgctgtttgtggacggtcacggtatttcgcatccgcgtcggcttggcgtcgccagtcattttggactgttggtggacgtgccgaccatcggcgtggcgaaaaaacggctatgcggtaaatttgaaccactttccgccgaacctggcgcacttagccccttaatggataaaggcgagcaactggcgtgggtatggcgcagcaaggcgcgctgtaatccgctgtttatcgcgacagggcaccgggtcagtactgacagcgcgctggcgtgggtacagcgctgtatgaaagggtatcgcctgccggagccgacgcgctgggcggatgccgtcgcttccgggcgtccggcgtttgttcgttggcaagaaattcagcgctgattcaggtaaactgccgctaatttccgattcgagattccatcatgttacaaaacccgattcatttgcgtctggagcggctggaaagctggcagcacgttacctttatggcctgcttgtgcgagcgcatgtacccgaactacgccatgttttgcaagcagacggaattcggcgacggacagatctaccgtcgcattctggatctgatctgggaaaccctgacggtgaaagatgcgaaggtcaatttcgatagccaactggagaagtttgaagaggcgattccggcagccgacgactatgatttgtacggcgtttacccggcgattgatgcctgcgtcgcattaagcgaattaatgcattctcgtcttagcggcgaaacgctggagcacgctattgaggttagtaagacttccattactacggtagcgatgttggaaatgactcaggctggtcgggaaatgaccgatgaggagctcaaaacgaaccctgccgttgaacaggaatgggatattcagtgggaaatattccgacttttagccgactgcgaagaacgtgatattgaactgataaaagggctcagggcagacctgcgcgaggctggcgagagcaatatcggtataaattttcagcaatgacaccagaaaacgtgatttaacgtctgatttgtcgtgccataaggcttcccttatgccccccgtctggtctacatttgggaggcgaaaaaaagtggctatcggtgcgtgtatgcaggagagtgcttttctggcatttccgtcgcactcgatgcttagcaagcgataaacacattgtaaggataacttatgaacaagactcaactgattgatgtaattgcagacaaagcagaactgtccaaaacccaggctaaagctgctctggaatccactctggctgctattactgagtctctgaaagaaggcgatgctgtacaactggttggtttcggtaccttcaaagtgaaccaccgtgctgagcgcactggccgtaacccacagaccggtaaagaaatcaaaatcgccgccgctaacgtaccggcgtttgtttctggtaaagctctgaaagacgcagttaagtaagacgcataactgtgaacagttttatcgaaggggctcatcagccccttttgtctgtctggcgtcgcgcgtttctgttttctggcgcgctgttgctgactgcctgcagtcataacgcttcaccgcctccgtttactgccagcggctttgccggcgatcacggcgcggtgcgtatctggcgtaaagatacgaacgatgaagtccatctgctttctgtttttagcccgtggcatagcggcagcacgacgaccagcgaatatcgttggcagggtgatacgctttcgcttattgaactcaatatttacagcaaaccgccagaacatattcgcgcgcgtttcgacgctcatggcgaactcagttttatgcagcgtgaagtcggggggcagaagcagcagctttccaacgatcagattgccttgtatcgctatcgcgccgaacaaatccgtcagaccagcgacgccttgcgcctggggcgggtcatactacgccagggacgctggcacgccgaccatacggtaaccacctgtgaaggtgaaacgctgaaaccggatctggattcctgggcaataagccacattgagcgccgccagaaccactcatcggtagaggtgagcgtagcatggctggaggcgccggaaggatcgcaacttttgctggtggcgaattcagatttttgtcactggcagccgcaagcgaaaagcttttgatggaataccggatggcgaagccgccattcggcaaacatgctttaccagtttcccatacccatgtgaccgccgccgcgatgataaccgccgccatagccgccgcaaccgccatagcccattcctgcgccgcgtggtatgccagcctgcgccatcgcgacatcccgtttcacgcgttgctcatctaacttctggcctaatgactccatctctttggcaaccgcgttaattttcgcagtatccggcgaactggcggtcagtagcgcgttgtattcataacgtttggatatcagttgctggcgcagcgcgctggtctgcgtatagtaatcatcataaatcttctgcgccgtcgcctgctgttccgtagttaacgggctacctccctgttgccacataccgtcattgttgccccagtgatgcccggcgaaggcggcgccggagctcagggccaaaagagagagggcaattagcgcgatagctgatttattgttccgtttcattttgcgttctcctgttgctcatcttatcctctctcttgcatcttccgtgccaggtaactattccttgtcgggcagcgagttaacccgcttcaggcggcaaaaagcgagtaaaaatgactcgcataacccgcctggcgagtcatttttacccatccgtatccgaaagggtgtgcgacaacgcgcggttatgcggagcgaagaatggcatgatctctgcttaagtaaggaaaataaaaacgagccggggaagcctgtgagttttatacgattacataaagatgccgctgcaacgtggttgagtcgactgttacctgcggcgatcttcattctggtggggctattttccattatggtcattcgcgactatggccgtgagagcgctgccgccaggcagacgctgctggaaaagggaaatgtactcattcgcgctctggagtccggcacgcgagtaggtatgggaatgcggatgcatcacgcgcagcagcagacattgctggaagagatggcgggtcagccaggcgtgttgtggttcgccgtaacggatgcgcagggggtaatcatcactcatagcaaccctggcatggtgggcaaatcgctctattccccatctgaaatgcatcaactaaaccccgggccgcaggagcgttggcggcgtgtcgacgttgctgctaacggcgagacggtgcctgcgctggaaatttaccgtcagttccagccgcttttcggtatgagaggtcacggtatgagggggcacggcatggcgcgtagcgccaatgacgacgaaccagcgaaacaaactatttttattgcctttgacgccagcgagctggccgcgacacaggcaagggagtggcgtaatacgctgattgttttgtctgcgttagcggcggtgctgttggcaacgttactggcgtttttttggcatcagcgttatcagcgctcgcacagagaactgcttgatgcaatgaagcgtaaagaaaagctggtggcgatggggcatctggcggcgggcgtcgcgcacgaaattcgtaacccgctctcgtccatcaaagggctggcgaaatactttgccgagcgcacgcctgccggcggcgagtcgcatgaactggcgcaggtgatggccaaagaggccgaccgtttgaaccgggtggtaagcgaattgctcgaactggtaaagcccgcgcatctgacgctccagacggttaacctcaatgatattattactcactccctgaatctggtcagtcaggatgcccaaagcagagagattcagttgagattcacggcgaatgagacgcttaagcgtattcaggctgacccggacaggctgactcaggtgctgttgaatctgtacctgaacgctattcatgcgattggccgccagggaacgattagcgtagaggcaaaagaaagtgggaccgaccgcgttatcatcactgttaccgatagcgggaaagggatcgccccggatcagctggaggcgatttttacgccttattttacgaccaaagctgacgggacaggcctggggctggctgtggtgcaaaatatcatcgaacagcatggcggcgcgattaaggtgaaaagtattgagggtaaaggcgcggtctttactatctggttgccagtgatagcgagacaacaggattaacaagggtgatacgcggaaaaatcgatattctggttgtggatgatgatgtaagccactgcacgattttacaggcgctgcttcggggctggggctataacgtcgctctggcctacagtgggcatgatgcgttggctcaggtgcgtgagaaagtctttgatctggtactgtgcgatgtgcgtatggcggagatggacggtatcgccacgctgaaggagattaaagcgctcaatcccgccattccgattttgattatgacggcattttccagcgtggaaacggcggtagaggcgttgaaagccggcgcgctcgactatttaattaaaccgctggattttgaccgtctgcaggagacgctggaaaaggcgttggcgcatacgcgggaaacgggcgctgaattgccatcggcgtcggctgcgcagtttggcatgattggcagcagtccggcgatgcaacatttactgaatgaaatcgcgatggtcgcaccatcagacgccacggtattgattcacggagactccggcacgggtaaagagctggtggcgcgggcgctacacgcctgtagcgccaggagcgatagaccgctggtcacgctcaactgcgccgcgcttaatgaatcgctgctggagtccgagctgttcggacacgaaaaaggcgcgtttaccggcgcggataaacgtcgggagggacgctttgtcgaagctgacggcgggacattgtttcttgatgaaatcggcgatatctcgccgttaatgcaggtacgtttgctgcgggcgattcaggagcgcgaagtgcaacgcgtgggaagtaaccagacgatatctgtggatgttcggttaattgccgctacccaccgcgacctggcggaagaggtgagtgccggtcgctttcgccaggatctctattaccgcctgaatgtggtggcgattgaaatgccttctttgcgccagcgtcgggaagatattccgctactagcagaccattttctgcggcgttttgccgaacgtaaccgcaaagtggtgaaggggtttacgccgcaggcgatggatctgctgatccactacgactggccgggcaatatccgtgagctggaaaacgctatcgagcgggcggtggtgttgctgacgggagaatacatttctgaacgcgaattgcctctcgctattgccgcgacgccgataaaaacggaatacagtggtgagatccaaccgctggtggacgttgaaaaagaggtgattctggcggcactggaaaaaacgggcggcaacaaaacggaagccgcccgtcaattgggcattacgcgcaaaacgctgctggctaaactcagccgttagttttgctcacgctcaatggcgcgccagccaatgtcgttacggctgaagctgccgtcccagcggatgtcggtcatcagggcgtaagcgcgtttctgcgcctcagccacggtgtggcccagcgcggtggcgcacagtacgcggccgccgctggtcaacacgcggtcgtcatcggcgagtttggtgcccgcgtggaaaactttaccgtcagccacttcttccagcggcaggccgtggatctcgtcgccggtgctgtagctgcccggataaccgcccgcggcgatcaccacgcctaatgaagcgcgttcgtcccactcggaggttttctcatccagcttgccgtcgcaggcggccaggcaaagatccaccaggtccgacttcatgcgtagcatgatcggctgggtttccggatcgccgaagcggcagttgaactcgataactttcgggttgccctgcttgtcgatcatcagacccgcgtacaggaagccggtataggtattcccttctgccgccatgcctttcacggttggccagatgatccgttccatggtgcgctggtggacttcatcggtcaccactggagccggagagtaagcccccatgccgccggtgttcgggccggtatcgccgttgcctacgcgtttgtgatcctggctggtggccatcggcagcacgtgctcgccgtcgaccatcacgataaagcttgcctcttcgccgtcgaggaactcctcaatcacgatacggtggcccgcgtcgccaaaggcgttgcctgccagcatgtcatgaacggcggcttcggcttcttccagcgtcatcgccacgataacgcctttaccggcagccagaccgtcagctttgatgacgatcggcgcgcctttctcacgcagataagccagggctggctcaatctcggtgaaattctggtattccgccgtcggaatctggtgacgagcgaggaaatctttggtgaaggctttggagccttccagttgggcggccccttcggttgggccaaagatcttcagacccgccgcgcggaacgcatcgaccacgccaatcaccagcggcgcttccgggccaacgatggtcaggtcaatcttctcgtgctgggcaaagctcagcagcgccggaatatcggtgacgccgatagccacgttctgcaacgcgggctccagcgcggtaccggcgttacccggtgcgacaaaaacagtatcaaccagcggcgactgtgcggctttccaggccagcgcgtgttcgcgtccgccgttaccaatcactaatactttcatgtttcgctccattaatggcggaagtggcgcatgtcagtgaagatcatcgcaataccgtgttcgtcggcagcggcaatcacttcgtcatcacggatagaaccgccaggctggatcacacagctcacgccaacggcggcagcggcatcaataccgtcacggaacgggaagaacgcgtcggaggccatcgcggaacctttcacttccagaccttcgtcagccgctttaatgccagcgattttcgcggagtacacgcggctcatctggcctgcgcctataccgatagtcatgttctctttcgcatacacaatggcgttggatttcacgaacttggcgaccttccagcagaacagcgcatcgcgcagctcctgctcggtcggctggcgtttagagaccacgcgcagttcagcttcgctcaccatacccagatccctgtcctgaaccagcaggccgccgttaacacgcttgaagtccagacccggcacacgctgtgcccactgaccgcaggtcagaacgcgaacgttctgtttggcggcggtgattttcagcgcctcttcggttgcggacggggcgatgatcacttccacgaactggcgggagataatggcctgcgcggtttcggcatccagttcgcggttgaaggcgataatgccgccgaacgcggaggttgggtcggttttatacgcacggtcgtaagcgtcgagaatagtggtgctcaccgccacgccgcacgggttagcgtgcttgacgattacgcaggctggctcgttgaactctttcacacactccagcgccgcgtcggtatcagcgatgttgttgtaagaaagcgctttgccctgaacctgctgtgcggtggcaacggacgcttctttcacattttcttctatatagaaggctgcctgctggtggctgttctcgccatagcgcatatcctgcttcttaatgaagttcagattcagcgtacgcgggaagcgaccggcggcttctttgctttcaccgtggtaggccggaaccatgctgccgaagtagttagcgatcatgctgtcgtaggcggcggtgtgttcgaaggctttaatcgcgagatcgaaacgggtgtcgagggtcagagaaccttcgttagcatccatctctttaataatggcgtcgtagtcgctgctcttcaccacgatggccacgtctttatggttcttagcagcagagcgcaccatggtcgggccgccgatatcaatgttctctaccgcatcttccagcgagcagccttcgcgtgccacggtctcggcgaacggatacaggttaacgacaaccatatcgataggggcgatgtggtgctgttccataatggcatcgtcctggccgcgacgaccgaggatgccgccgtggacttttggatgcagggtctttacgcgtccatccatcatttccgggaaaccggtgtaatcggaaacttcggtcaccggcaggcctttttctgctaacaggcgggcggtgccccccgtagacagcagctccacaccgcgtgcggaaagtgcctgggcgaattcgatgataccggccttgtcagaaacactgagcagagcgcggcggactggacgacgttgttgcatggtaaatcccctggatttgacgattacagagagcgttagctgaatttttcgtgaaaaactcagctaacgccccttatggggtattctcattttgcggcgacattgtaacgaaaacgtttgcgcaacgctcgcgaatttttctttttaaattctggccccgcttttatccctgaaagatcatttgcagagtgagaagatccaggagatgaacgcgcattttgtggataagtctgtgcgtaaatgggtataaccaggggttttgctggggaatgcagcaaacagtcatttttctgcaatttttctattgcggtcagcagagaactccctataatgcgcctccatcgacacggcggatgtgaatcacttcacacaaacagccggtcggttgaagagaaaaatcctgaaattcagggttgactctgaaagaggaaagcgtaatatacgccacctcgcgacggtgagctgcaagccgcgtcgcacctgctctttaacaatttatcagacaatctgtgtgggcactcgaagatacggattcttaacgtcctaggacgaaaaatgaataccaagtctcaagagtgaacacgtaattcattacgaagtttaattcattgagcatcaaacttttaaattgaagagtttgatcatggctcagattgaacgctggcggcaggcctaacacatgcaagtcgaacggtaacaggaagcagcttgctgcttcgctgacgagtggcggacgggtgagtaatgtctgggaaactgcctgatggagggggataactactggaaacggtggctaataccgcataacgtcgcaagaccaaagagggggaccttcgggcctcttgccatcagatgtgcccagatgggattagcttgttggtgaggtaacggctcaccaaggcgacgatccctagctggtctgagaggatgaccagccacactggaactgagacacggtccagactcctacgggaggcagcagtggggaatattgcacaatgggcgcaagcctgatgcagccatgccgcgtgtatgaagaaggccttcgggttgtaaagtactttcagcggggaggaaggtgttgtggttaaataaccgcagcaattgacgttacccgcagaagaagcaccggctaactccgtgccagcagccgcggtaatacggagggtgcaagcgttaatcggaattactgggcgtaaagcgcacgcaggcggtctgtcaagtcggatgtgaaatccccgggctcaacttgggaactgcatttcgaacctggcaggcttgagtcttgtagaggggggtagaattccaggtgtagcggtgaaatgcgtagagatctggaggaataccggtggcgaaggcggccccctggacaaagactgacgctcaggtgcgaaagcgtggggagcaaacaggattagataccctggtagtccacgccgtaaacgatgtctacttggaggttgtgcccttgaggcgtggcttccggagctaacgcgttaagtagaccgcctggggagtacggccgcaaggttaaaactcaaatgaattgacgggggcccgcacaagcggtggagcatgtggtttaattcgatgcaacgcgaagaaccttacctggtcttgacatccacagaagaatccagagatggatttgtgccttcgggaactgtgagacaggtgctgcatggctgtcgtcagctcgtgttgtgaaatgttgggttaagtcccgcaacgagcgcaacccttatcctttgttgccagcgattaggtcgggaactcaaaggagactgccagtgataaactggaggaaggtggggatgacgtcaagtcatcatggcccttacgaccagggctacacacgtgctacaatggcgcatacaaagagaagcgacctcgcgagagcaagcggacctcataaagtgcgtcgtagtccggattggagtctgcaactcgactccatgaagtcggaatcgctagtaatcgtggatcagaatgccacggtgaatacgttcccgggccttgtacacaccgcccgtcacaccatgggagtgggttgcaaaagaagtaggtagcttaaccttcgggagggcgcttaccactttgtgattcatgactggggtgaagtcgtaacaaggtaaccgtaggggaacctgcggttggatcacctccttaccttaaagaactgttctttgcagtgctcacacagattgtctgatgaaaagtaaatagcaaggcgtcttgcgaagcagactgatacgtccccttcgtctagaggcccaggacaccgccctttcacggcggtaacaggggttcgaatcccctaggggacgccacttgctggtttgtgagtgaaagtcacctgccttaatatctcaaaactgacttacgagtcacgtttgagatatttgctctttaaaaatctggatcaagctgaaaattgaaacacagaacaacgaaagttgttcgtgagtctctcaaattttcgcaacacgacgatgaatcgaaagaaacatcttcgggttgtgaggttaagcgactaagcgtacacggtggatgccctggcagtcagaggcgatgaagggcgtgctaatctgcgataagcgccggtaaggtgatatgaaccgttataaccggcgatacccgaatggggaaacccagtgtgattcgtcacactatcattaactgaatccataggttaatgaggcgaaccgggggaactgaaacatctaagtaccccgaggaaaagaaatcaaccgagattcccccagtagcggcgagcgaacggggaggagcccagagcctgaatcagcatgtgtgttagtggaagcgtctggaaaggtgcgcgatacagggtgacagccccgtacacaaaagcgcatgtgctgtgagctcgatgagtagggcgggacacgtggtatcctgtctgaatatggggggaccatcctccaaggctaaatactcctgactgaccgatagtgaaccagtaccgtgagggaaaggcgaaaagaaccccggcgaggggagtgaaaaagaacctgaaaccgtgtacgtacaagcagtgggagcacaggtttacctgtgtgactgcgtaccttttgtataatgggtcagcgacttatattctgtagcaaggttaaccgtataggggagccgtagggaaaccgagtcttaaccgggcgttaagttgcagggtatagacccgaaacccggtgatctagccatgggcaggttgaaggttgggtaacactaactggaggaccgaaccgactaatgttgaaaaattagcggatgacctgtggctgggggtgaaaggccaatcaaaccgggagatagctggttctccccgaaagctatttaggtagcgcctcgtgaattcatctccgggggtagagcactgtttcggctagggggccatcccggcttaccaacccgatgcaaactgcgaataccggagaatgttatcacgggagacacacggcgggtgctaacgtccgtcgtgaagagggaaacaacccagaccgccagctaaggtcccaaagtcatggttaagtgggaaacgatgtgggaaggcccagacagccaggatgttggcttagaagcagccatcatttaaagaaagcgtaatagctcactggtcgagtcggcctgcgcggaagatgtaacggggctaaaccatgcaccgaagctgcggcagcgaacgtatcacccaagacaactttacggagttgacgattgacggagcgaagcgacgtcaaagcgttcattaaagtcgagttggcttagggatacgttcgttgggtaggggagcgttctgtaagcctgtgaaggtgtgtcgtgaggcatgctggaggtatcagaagtgcgaatgctgacataagtaacgataaagcgggtgaaaagcccgctcgccggaagaccaagggttcctgtccaacgttaatcggggcagggtgagtcgacccctaaggcgaggccgaaaggcgtagtcgatgggaaacgggttaatattcccgtacttggtgttactgcgaaggggggacggagaaggctatgttggccgggcgacggttgtcccggtttaagcgtgtaggtgtgtgttccaggtaaatccggttcactttaacactgaggcgtgacgacgaggcactacggtgctgaagcaacaaatgccctgcttccaggaaaagcctctaagcatcaggtaacatcaaatcgtaccccaaaccgacacaggtggtcaggtagagaataccaaggcgcttgagagaactcgggtgaaggaactaggcaaaatggtgccgtaacttcgggagaaggcacgctgacacgtaggtgaagtgatttactcatggagctgaagtcagtcgaagataccagctggctgcaactgtttattaaaaacacagcactgtgcaaacacgaaagtggacgtatacggtgtgacgcctgcccggtgccggaaggttaattgatggggtcagcgcaagcgaagctcctgatcgaagccccggtaaacggcggccgtaactataacggtcctaaggtagcgaaattccttgtcgggtaagttccgacctgcacgaatggcgtaatgatggccaggctgtctccacccgagactcagtgaaattgaactcgctgtgaagatgcagtgtacccgcggcaagacggaaagaccccgtgaacctttactatagcttgacactgaacattgagccttgatgtgtaggataggtgggaggctttgaagtgtggacgccagtctgcatggagccgaccttgaaataccaccctttaatgtttgatgttctaacgtggacccgtaatccgggttgcggacagtgtctggtgggtagtttgactggggcggtctcctcctaaagagtaacggaggagcacgaaggttggctaatcctggtcggacatcaggaggttagtgcaatggcataagccagcttgactgcgagcgtgacggcgcgagcaggtgcgaaagcaggtcatagtgatccggtggttctgaatggaagggccatcgctcaacggataaaaggtactccggggataacaggctgataccgcccaagagttcatatcgacggcggtgtttggcacctcgatgtcggctcatcacatcctggggctgaagtaggtcccaagggtatggctgttcgccatttaaagtggtacgcgagctgggtttagaacgtcgtgagacagttcggtccctatctgccgtgggcgctggagaactgaggggggctgctcctagtacgagaggaccggagtggacgcatcactggtgttcgggttgtcatgccaatggcactgcccggtagctaaatgcggaagagataagtgctgaaagcatctaagcacgaaacttgccccgagatgagttctccctgagacttagagtctcctgaaggaacgttgaagacgacgacgttgataggccgggtgtgtaagcgcagcgatgcgttgagctaaccggtactaatgaaccgtgaggcttaaccttacaacgccgaagatgttttggcggttaagagaagattttcagcactgattccggattttcgggaacgaaagattttacgctgaggcaaggcggcaaatgaaggaaaggaaggagcatacagaagtatgtgactgactttgcgaatgcagccaacgcagcatcggtgtaaaagattcgtttctggcaacagaatttgcctggcggccgtagcgcggtggtcccacctgaccccatgccgaactcagaagtgaaacgccgtagcgccgatggtagtgtggggtctccccatgcgagagtagggaactgccaggcatcaaattaagcaaaaggctcagtcgaaagactgggccttttgttttatctgtggtctgtcggtgagcactctcctgaggaggagaaatccgccgggagcggatttgaacgttgcgcagcaacggcccggagggtggcgggcaggacgcccgccataaactgccaggcatcaaacaagtgaagaagcccgtccgtcaggacgggcttttttgcgtgtgcggtaactgtaaaaatgtaggcctgataagcgcagcgccatcaggcaacctgcaccgccggatggccgcttcgccttatccggcctacatgcacttatcagacagcgccgctactcacggataaattaaattcaataatggatacggtttcccaagatcgtcgacctccgaacgtcccgtcaccttgaatcccattttcttataaaatccaacagcttgtgtattttgctcgttaacattggttgtcaatcccggcgccagtgttaacgcatgttcaaccagaatcttaccgataccctgaccgcgcacgtccggatctataaacagagcatccatatgctcaccggtaagcagcataaaccctaccggctcatcctgatcggtcacggcaacccatagtggcgcttctggcagaaaatcgctcaccagttcttccagttcggcccgataagcgtttgacagaaaatcgtgcgtggcatcgactgagcgacgccagatcgcaatcagtttttccccttcctcatgccttgaacggcgaatgttaatcatcatcttcactccttttttgcttacttctattctaatgcaaatgctgtcgtgaaactttctcaccttgaacttgcagactcgacattcgcctgatttctgagtatcttcagctatctggatgtctaaacgtttaaacgtatgtcgtgaggttatcaggttatgccgattcgcgtgctggacgagctacccgccgtcaattttttacgtgaggagaatgtcttcgtcatgacgacttctcgcgcatcaggtcaggaaattcgcccgctaaaggtacttatccttaacctgatgccgaagaagattgaaacggaaaatcagtttctgcgtttgctatcgaactcgccattgcaggtcgatattcaactactgcggatagatgcccgcgagtcgaggaacacgccagccgagcatctgaacaacttttactgtaacttcgacgatatctgcgatcagaactttgatgggcttatcgtgaccggagcgccgctgggtctggtggagtttaatgacgtggcttactggccgcagattaggcaggtgctggaatgggcgaaagatcacgttacttcgacgctatttgtctgttgggccgttcaggccgcactcaatattctgtatggtatccctaagcagacccgtacagataaactttccggcgtctatgaacatcacatccttcatccacatgctctgttaacgcgtggttttgatgattcgtttctggcgccacactcacgctatgccgatttcccggcggcgctgatacgggattatacggatcttgaaattctggccgaaacagaagaaggggatgcgtacctgtttgccagcaaagataaacgtattgcgtttgtcaccggtcatcctgaatatgacgctcatacgttagcgggtgaatattttcgtgacgttgaggccgggttaaatccggaggttccgtacaactatttcccaaaaaacgatccgcaaaacataccgcgcgcaacctggcgcagccacggtaatttactgtttactaactggctcaactattatgtctaccagattacgccatatgatctgcgtcacatgaatccaaccctggattaatcttctgcttctgacgatcctaaagcgtttcagcatgttgaatcaggcaccttcgggtgccttttttatttccgaaacgcacctcatcatgtaattaaatttaatttatattgttatcaataggttaatgcataattaaattaaaaatggaaattgtttttgattttgaaatttaattgagtagtcttagttgtgttgaacgaaaagtgcacagtgatccttcgttcgcattggggatgtatctggatcaacaacgaggagctgcatgatgaatccacaggcaaccacaactgatgaattaacctttaccaggccgcaaggcgagctggaaaagcaagtcctgaccgctgaagcagtcgagtttttgacggagttagtcacccgttttacgccaaaacgcaataaactcctggctgcccgtatccagcaacagcaggatattgataacggtaagttgcctgattttatttcggaaaccacttccattagagaaagtaattggcagattcgtggtattccggcggatttacaggatcgccgagtagaaattaccgggccggttgaacgtaaaatggtgattaatgccctgaacgcaaatgtgaaagtgtttatggcggattttgaagactcgctggcgccggactggaataaagttattgatggtcaaatcaacctgcgtgatgcggtgaacggcaccattagctataccaacgaagccggaaaaatctatcagctcaagcccgatccggccgtattgatttgtcgtgtacgtggtctacatctgccagaaaaacatgttacctggcggggggaagccattcccggcagcctgtttgattttgctctgtactttttccacaactataaagcgctgctcgctaaaggtagcggcccgtatttttacctgccgaaaacgcaagcctggcaggaggcagcctggtggagcgaagtgttcagctacgccgaagaccgctttaacctgccgcgcggtacgatcaaagcgaccctgttgattgaaacgctgccggctgttttccagatggatgagattcttcatgcgctgcgtgatcatatcgtcggtctcaactgtggtcgctgggattatattttcagctatatcaaaacgttgaaaaatcacccggatcgcgttttgccggacaggcaggtggtaacgatggacaaaccgtttctgagcgcctactcgcgcctgctgatcaaaacctgccacaagcgcggcgcgttcgcgatgggcggtatggcggcgtttatcccgagcaaagacgttgaacgcaacaatcaggtccttgccaaagtgaaagcggataaagcgctggaagcgaacaacggccacgacggcacgtggattgcgcatcctgggttggcggataccgcaatggccgtctttaacgaggtactgggcgagcacaaaaatcagctgttcattacccgtgatgaagatgcgccgattaccgctgaacagttactggagccatgtgaaggcgaacgcacagaagcgggaatgcgcgccaatattcgcgtggcagtgcagtacattgaagcgtggatctccggcaatggctgtgtaccgatttacggtctgatggaggatgccgcgacggcggaaatctcacgaacctctatctggcagtggattcaccatgagaaaacactgagcaatggaaaacccgtaacgaaaacgcttttccgcgaaatgttggcggaagagatgcgggtaatccaggacgaactgggcgagcaccgctacagcagcgggcgcttcgacgatgccgcacgtctgatggagcaaatcaccacctcagatgacttaatcgacttcctcaccctgccgggctatcgcttactggcttaattcaccacataacaatatggagcatctgcacatgaaaacccgtactcaacaaatcgaagaattacagaaagagtggacacaaccgcgctgggaaggcatcacccgcccgtacagcgcggaggaggtggtgaaattacgcggctcggttaacccggaatgcacgctggcgcagctcggcgccgcgaaaatgtggcggctgttgcacggtgaagcgaaaaaaggctatatcaacagccttggcgcgctgaccggcggtcaggcgttgcagcaggcgaaagccggtattgaggcgatttatctttcaggctggcaggtggcggcagatgccaacctggcatccagcatgtatccggatcaatcgttgtacccggcaaactctgttccggcggtagtggatcggatcaacaacacttttcgtcgtgcagatcagatccagtgggcatccggtattgaacccaacgatccgcgctatgtggattacttcctgccgatcgttgctgatgcggaagccggttttggcggcgttctgaatgccttcgaactgatgaaatcgatgattgaagccggtgcagcggccgttcacttcgaagatcagctggcgtcggtgaagaaatgcggccatatgggcggcaaggtgctggtccccacgcaggaggcgattcagaaactggttgctgcgcgtctggccgctgatgtgatgggcgtcccgacgctggtgattgcgcgtaccgatgcggatgcggcagatctgatcacctccgactgcgatccctatgacagcggttttattaccggcgaacgcaccagcgaaggtttctaccgcacccatgcgggcattgagcaggcgatcagccgcggtctggcgtatgccccgtatgccgatctggtatggtgcgaaacctctacgccggatctcgaactggcgcgtcgttttgccgatgctatccacgcgaagtatccgggcaaactgctggcctataactgttcaccatccttcaactggcagaagaatctggacgacaagaccattgccagcttccagcagcagttgtcggacatgggttacaaataccagtttattaccctggcgggcatccacagcatgtggttcaacatgttcgacctggcgcatgcatacgcgcagggcgagggcatgaagcactatgttgagaaggttcaacaacccgagttcgccgcggcgaaagatggctacacctttgtttcccaccagcaggaagtgggtactggttacttcgacaaagtcaccaccattattcagggcggcgcgtcatccgttaccgcgttaacgggttccaccgaagaagcgcagttttgattgatgcccggtggcgctgcgcttaccgggcctacagatagcgtaggccggataagcgaacgcgccatccggcatgacgtggtgccggatgagggaaaaaaatgccgcgtggcctggaattactgattgctcaaaccatcctgcaaggctttgacgcgcagtatggtcgatttctggaagtgacttccggcgcgcagcagcgttttgaacaggccgactggcacgccgtccaacaggcgatgaaaagccgtatccacctctatgatcatcatgtgggtctggtggtggagcaactgcgctgtattaccgatggcaaaagtaccgacgcggatttccttttacgcgttaaagagcattacacccggctgttgccggattacccgcgcttcgagattgcggagagctttttcaactccgtttattgccggttatttgaccaccgctcgttaacacccgagcggttgtttattttcagttcgcaaccggagcgccgcttccgtactatcccgcgcccgctggccaaagacttctttcccgatcacggttgggagccgctgttgatgcgcatactcagtgacttaccgctgcgtctgccctggcagaataaaagccgggatatccgctatattatcgcgcacctgactgaaacactgggcgaggacgcgctacctcgctgccatgtccaggtggcgaacgagttgttttaccgtaataaagcggcctggctggtaggtaaattaaccacacctgacggtacgctgccgtttttattgccgattcatcgcactgatgagggggaactgtttgtcgatacctgcctgaccaccacggcagaagcgagcattgtgtttggttttgcccgctcttattttatggtgtatgcgccgctgcctgccgcgctggttgagtggttgcgtgaaatcctgccgggtaaaaccactgccgaactgtatatggcgattggctgccagaaacatgcgaaaaccgaaagctaccgcgaatatttatgttatctggctgaaagcgatgagaaatttattgaggcgcctggcatccgcggcatggtgatgctggtgtttaccctgccaggtttcgaccgggtatttaaaatcattaaagacaaattcgccccgcagaaagagatgtctgccgcccatgtgcgtgcctgttatcaactggtaaaagagcatgatcgcgtcggtcgtatggcggatacccaggagtttgagaatttcgtgctggataaacggcaaattgatccggcgctgatggcgctgttacgacaagaagcgccagagaagattaccgatcttggggaacatatcgtcattcgccatctctatattgaacgtcgcatggtgccgctcaatatctggctggaacaggtagaaggccagcagttgcgcgatgcgatagaagaatatggtaatgcgattcgccagcttgccgccgctaatattttccccggcgatatgttgtttaaaaactttggcgttacccgtcatggtcgcgtggtgttctacgactacgatgaaatttgctacatgacggaagtgaatttccgcgatattccgccagcgcgttatccggaagacgaactggccagcgaaccctggtatagcgtctcgccaggtgatgttttcccggaggagtttcgccactggctgtgtgccgatccgcgtatcgggccattgtttgaagagatgcatgccgacctgtttcgcgccgattactggcgcgcgctacagacgcgtattaaagaagggcatgtagaagatgtgtatgcctatcgacgtagacagcgctttagcgtgcgttacggcgcgatctcaagtacggcgaactcttcgtaaaccagttccatctccggcgaccaattaccctcgcgctcaaaaaaggcccggtgtgccgcttgccagtacgccaggctaagatcgccttcgccttccagtgcggcgagatcggcgctcatctcgttaaaacggatcagcctgagcgccagcgtgcgtatgacgcacacggcgtcgcctgtgccgttgagcacaatgtgatatgacccgggcgtgacagggggttgctctttctgatagctaaccagcgagctacaggtgccacgctttttaccggcgaccactagcgccgccagctcgtcggccagcgccggcgaatcaccgaaagaccaacagaaggcctgtgggtacttctcctgccagtataatttcaggctgctcatttcagcgagttccaccataggccagcgttacctctttcgccgctttaatcaccatggcgccaagttcggtgacgcgatcgtcggtaatgcgtgagcaggggccggaaatagagagggccgcaaacggttcgcggtgttcgtcataaatacacgaggccacgcagcgcagaccgagcgcatgttcttcgtcgtcaaaggaatagccgcgcttgcgtgtttgggcgaggtcatctttcagatgcagcggcgacaccagcgtcgcatgggtataagcgtgcaaccccttgcggtgcagcagactggtaacctgttcctcactgagctgtgataaaaacgccttgcccgcgccagaggcgtgcatgggcagcttgccgccaataggggcggacatgcgcatcaattgtgtgcactgcacctggtcgataataatagcctgatggtcgctctggtcgagtacggcaaggtttaccgtttcgccggagtcctccatcagcttgcgcaaaatcggatggacaatcgccagcagattacggctctgtaagaagctgctaccgacgataaacgcgtgtgcgcctacggcccaatggcccagctcaccaacctggcggacaaaaccctgctgctgcatggtggtgagtagacggtgagtcgtggaattaggcaaacccgcctgttgcgccagttcggtcagcgcgacgctgccgttggactcggcaatccactccagcagcttcagaccgcgagttaatgactgaacctgcccggttacgggtgcagtggtagcggcaggttttctcccgcgtttcgcgggaacaggggcaaccatggcagactcctttttctgtatcgtggaaatcattttcgttttattcaattataatgcaagagttcctgaactgatcggatgagtgacatcacaggatgcccgatagcgctgcgcttatcaggcctacgctttgggagccgccaaagtaatttgtagactgataaggcgcttgcgccgccatccggcaaagcgacagaagtgggtggcaagctgaacatgtctcatgttgcccgttgttctcttttccgccagcacgctttgtgccagtatggctcgttacgtggagcgttgtcgggagcgagtgtgagcagcaaagttgaacaactgcgtgcgcagttaaatgaacgtattctggtgctggacggcggtatgggcactatgatccagagctatcgtctacatgaagaagatttccgcggggagcgctttgccgactggccctgcgacctgaaaggcaacaatgacctgctggtcctcagcaagccggaggtgatcgccgctatccacaacgcctactttgaggctggcgcggatatcatcgaaaccaacacctttaactcgacaaccattgcgatggcggattaccggatggaatccctgtcggcggaaattaactatgcggcggccaaactggcgcgcgcctgcgccgatgaatggacggcgcgaacaccagaaaaaccacgctttgttgcgggcgtgcttggtccaactaaccgcacggcctccatttcgccggacgtcaacgacccggcgtttcgtaatatcaccttcgatcagctggtggcggcctaccgtgaatccaccaaagcgctggtggaaggtggcgcagatctgattctgattgagaccgtttttgacaccctgaatgcgaaagcggcggtgtttgcggtgaaagaagagtttgaagcgctgggcgttgacctgccgatcatgatttccggcaccatcaccgacgcctctggccgtacgctttccggccagactaccgaagccttttataactcgctgcgccacgccgaggcgctcacttttggccttaactgcgcactggggccagatgaactgcgccagtacgtccaggaactgtcgcggattgccgaatgctacgtcaccgcgcacccgaacgccggcctgccgaacgctttcggcgagtatgacctcgacgccgacaccatggcgaaacagattcgcgaatgggcggaagcgggcttcctgaatatcgttggcggctgctgcggcaccacgccggagcatattgcggcgatgagccgcgccgttgccggtttgctgccgcgccagctgccggatatcccggtcgcctgccgcctttccggcctggagccgctgaacattggcgacgatagcctgtttgtgaacgtcggcgaacgtactaacgtcaccggctcggccaaatttaaacggctgatcaaagaagagaaatacagcgaagcgctggatgtcgcccgtcagcaggtagaaagcggcgcgcagattattgatatcaatatggatgaggggatgctcgacgccgaagcggcgatggtgcgtttcctcagcctgattgccggtgagccggacattgcccgtgtaccaatcatgatcgactcctccaaatgggaggttatcgaaaaagggctgaagtgcattcagggtaaaggcatcgtcaactctatttcgatgaaagagggcgtggaagcctttattcatcatgcgaagcttctgcgtcgctacggcgcggcagtggtggtgatggcctttgatgagcaggggcaggccgatacccgcgcgcgtaaaatcgaaatttgccgccgagcctacaaaattctcaccgaagaggtgggtttcccgccggaagacatcatcttcgacccgaatatcttcgccgtggcgaccggtattgaagagcacaacaactacgcgcaggactttatcggcgcttgcgaagacatcaaacgcgagctgccgcacgcgctgatctccggcggcgtgtctaacgtgtccttctcgttccgcggcaacgacccggtacgtgaggctatccacgcggtattcctctactacgccatccgcaacggtatggacatgggcatcgtcaacgccggacagctggctatctacgacgacctgcccgccgagctgcgcgatgcggttgaagatgtcattcttaaccgtcgcgatgacggcactgagcgtttgctggatttggcggagaaataccgcggcagcaaaaccgacgaagctgccaacgcccagcaggcggaatggcgtagctgggacgtgaaaaagcgtctcgaatactcgctggtgaaaggcattaccgaatttatcgaacaggataccgaagaagcccgtcagcaggccgcccgcccgattgaggtgattgaagggccgttgatggacggcatgaacgtggtcggcgacctgttcggcgaagggaaaatgttcctgccgcaggtggtgaaatccgctcgcgtgatgaaacaagcggtggcctacctggagccgtttattgaagccagcaaagaaaaaggctccagcaacggcaagatggtgatcgccaccgtgaagggcgatgtgcacgatattggtaaaaatatcgttggcgtggtgctgcaatgtaacaactacgaaatcgtcgatcttggcgtgatggtgccagcggagaaaatcctcagaacggcgcgtgaagtgaatgccgatctgatcggtctttccgggctgattaccccgtcgctggacgaaatggtcaacgtggcgaaagagatggagcgtcagggctttactatcccgctactgatcggcggcgcaaccacttcgaaagcgcatacggcggtgaaaatcgagcagaactacagcggtccgacggtctacgtgcagaatgcttcgcgtaccgtgggcgtggtggcggcgctactctccgacacccagcgtgatgactttgtcgcccgtacccgcaaagagtacgaaaccgtgcgtattcagcacgcccgcaaaaaaccgcgcacgccgccggtcacgctggaggcggcgcgcgataacgatctggcattcgattgggaacgctacaccccgccggtagcccaccgtctgggcgtgcaggaggtggaagccagcatcgaaactctgcgcaactatatcgactggacgccgttctttatgacctggtcgctggccggcaaatacccgcgcattctggaagatgaggtggtgggcgttgaggcgcagcgtctgtttaaagacgccaatgatatgctggataaactgagcgccgagaaactgttgaatccgcgtggcgtggtgggcctgttcccggcgaaccgtgtgggtgacgacatcgaaatctatcgcgacgaaacccgtactcatgttctgacggtcagccaccacctgcgccagcagaccgagaaagtcggttttgccaactactgtctggcggattttgtcgcgccgaaactgagcggcaaagcggattacatcggtgctttcgcggtgaccggcggtctggaggaggatgcgctggcggacgccttcgaagcgcaacacgacgactataacaagatcatggtgaaagcgattgccgaccgtctggcggaagcgttcgcggaatatctgcatgagcgtgtacgtaaggtttactggggatatgcgccgaacgagagcctgagtaacgacgaattaatccgcgaaaactaccaggggattcgcccggcgccgggttatcctgcctgcccggaacataccgaaaaaggcactatctggcagctactggatgtcgaaaaacacaccgggatgaagctcaccgaatctttcgccatgtggccaggcgcgtcggtctccggctggtacttcagccatcctgagagcaaatacttcgcggtagcgcagatccaacgcgatcaggtgacagattatgctttccgtaaaggaatgagcgttgaggatgttgagcggtggctcgcgccgaacctgggttacgatgcggactgattcataaaatcgtcacttttccttacaacatacaaggcactcattgggtgccttgtctctttcttacaattaaacccttatactgaaggaaggctctacgctgaatttgccggatggcggcgtaaacgccttatccagcataccgtattacgtatggtaagcccggtggcgtgcaacgccagcaggccttaacgctttgcgccatcaggcaatttatcgcaagtgagcttcaggaaaacgtataacgataaggagaacctgacgccgtgttaactttgctccatctactttctgccgttgcgctgttggtatggggaacacatatcgttcgtactggcgtaatgcgcgtgtttggcgcgcgtctacgcactgtcctcagccgcagcgtggaaaagaaaccgctcgccttttgtgcgggtatcggtgttaccgcgctggtacaaagcagtaacgccaccactttattggtaacgtcgtttgtcgcccaggatcttgtcgccctgacgccagctctggtgattgtgctgggcgctgatgtgggtactgcgctaatggcgcgtattctcacctttgatttgtcgtggctgtcgccgctgctgatttttattggcgtgattttctttttgggacgtaagcagtcccgtgccgggcagcttggtcgcgtcggtatcgggcttggcctgattctactggcgctggagctgattgtgcaggcggtgacgccgatcactcaggctaatggcgtgcaggtcattttcgcgtcgctgacgggcgacattatgctggatgcgctgattggcgcgatgttcgctattatcagttattccagcctggcggcggtgttgctgacggcgaccctgacggcggcggggattatatcgttcccggtggcgttgtgcctggtcatcggcgccaatctgggatcggggctgctggcgatgctcaataacagcgccgccaatgctgccgcgcgtcgcgtagcgctcggcagcctattgttcaaattgatcggcagcctggtcatcctgccgtttgtccatccgctggcgaatctgatggatgagctatcgctaccgaaatcagagctggtgatctatttccacgttttctataacctggtgcgctgcctggcgatggtgccatttgccgagctgatggcgcgtttttgtaaacgaattattcgtgatgagcctgaactggatacccatctgaagccgaaacatctggatgtcagcgcgctggatacgccaacgctggcgctggccaatgctgcccgcgaggtgttgcgcattggcgatgcgatggaacagatgatggaagggctaaaaaaggtcatgcacggcgagccgcgtgaagagaaagcgctgcgcaagctggcggatgacgttaacgtgctctacaccgcgattaagctttatctggcgcgaatgccaaaagacgagctggcggcggaggagtcccgccggtgggcggagattattgagatggccctgaacctcgaacaggcgtcggatattatcgagcgaatgggcagtgagattgccgacaagtcgctggcggcgcgtcgggcattttcagaagaaggattgaaagagctggatgcgctttacgatcaactgctcagtaatctgcaactggcgatgtcggtctttttctccggcgatgtcaccagcgcccgtcggttgcgccgcagtaaacatcgcttccgtatacttaatcgccgatactcacatgcgcatgtcgaccgcctgcaccagcagaacgtgcaaagcattgaaaccagctcgctccatttagggctgctgggcgatatgaagcgtcttaactcactgttctgttcggtcgcctatagcgtactggaacagccggatcaggacgaggaacggggcgagtattaagtgaaatgccggatggcggggcctacggagaacatgcgcgtaggcccgtcattcggcattcaatatggcctgggattaaaagcgatgaccagcttccagcgccacggcctcttcgcccgctttaaacacccaggtggtattcgggccgccgagaaccgcctggccgttgctcacctgaatccagttaccttccggcaaaccaatcactgtcagttccggcgcgaccaccagcagttcgcgaatacgctgctcgcgggtctcgcccttatgaccttccggcaaggcgttagtgaagtgaggattaatttgcagcgggaacagatccagcgcgtcgaaaccgtttggatcgacgatcggcatatcgttggtcgtgcggatagtcgggcaggcaaggttggcgcccgcgctccagccgatatacagcgcgccgcgttttaccctgtccgccatcggcgccagcagcccgcgttcacgcgattctttcagtagctggaaggtatttccgccgccgacaataatgatttccgctttctcaatcgccgcaagcggatcggcgacacgatgaatccctgtgacgtttacccctaatggcgcaagcacctctgcggttttatccgtgtactcgtcccatgtttgcgtgacgccggcaaacggaataaacacggctgagcgtcgaccgttcaattgattcgctatcagcggcagagcgtgttccagccaggccttacccggcagcgtcgagttacttaataaaagcagttccattacttctccacctcatcaggaaatgtcaaaacgtaataatgctaccattatccatttaatgtcttactgatatggctcatgatgttacgcgtgtcacaggcaaagcgcggtcgctaaaagtgacgacaggccagatctgccatctggtatcgcctgaaaaattacaggtataatccgcaaaattatttaacacgtttagagacgaaaatggcaaaactgaccttacaagagcaactgctacaagcgggattagtgaccagcaaaaaaatggccaaagtccagcgcacggctaaaaaatcacgcgttcaggctcgtgaggccagagaggcggtggaagaaaataaaaaggcgcaacttgagcgtgataaacaactcagtgaacagcaaaaacaagcggttttagcgaaagagtttaaagctcaggttaagcaacttattgaaatgaatagaatcaatgtatctaaaggcgatattggttttaacttcaccgataataacgtcatcaaaaaaatagacgtggataagctcactcagacgcaactgattaatgggcgtctcgcgattgcgcgtctggttatcaataacagcggtgaatgtgaatatgcgattattcccgcgagcgtcgccgataaaatcgcacaacgagatgcggacagtattgtcgtaaacagtgcgctgagtcaggaagagcaggacgaagatgatccgtatgccgattttaaagttcccgacgatttgatgtggtaagtcacattcccgacgtttatgtagaaaaatttctcagagagtaaatatgctgaccgacacatctacccggcttaataaatatatcagtgaaagcggcatctgttcgcgtcgcgaggcggaccgttttatcgaacagggcaatgtctttatcaacggcaaacgcgccgccattggcgatcaggtagtcgcaggggatattgttaaagtaaatggtcggttgattgagccgcgagaagcggatgatttagtgctgattgcgctgaataaaccggttggcattgtcagtaccactgaagacggcgaacgcgacaatattgtcgattttgtgaaccacagcaaacgtatcttcccgattggtcgtctggataaagactcgcaggggctgatatttctgactaaccacggcgatctggtcaataagattctgcgtgccggtaacgatcacgaaaaagagtatctggtgacggtggataaaccgattaccgacgagtttattcgtggtatgggcgctggcgtgccgattctgggtaccgtcaccaaaaaatgtaaggtgaaaaaagaggcgccgtttgtctttcgcattaccctggtgcagggattaaaccgtcagatccgtcgtatgtgtgaatactttggttatgaagtgacgaaactggagcgtacgcgcattatgaacgtcagcctgagcgggattccgctgggcgagtggcgcgatctgacggacgatgagctgatcgatctgtttaaattgattgagcgttcctcttccgaagccaaaccaaaggccaaagcgaagccgaagaccacgggtattaagcgaccggtcgtggcgatcgaaaaaagcaatgagaaagcgcgcccgacatcaagcggtaagcgctttacctcgccgggacgaaagaagaaaggacgttaacgtctgccgcgcgtcggcgtattcgccgaccaggagaatgacgcttccgtatcgggtttatacgcctgcttcttcttcaactggcgggcttttttcgcttcagcctcacgcagcgccatcagcttatcgatgtactccttttttacgctgttggtctcagaattggtcagcggacgaccgtgtgcaatacgggcgcggtccagcaacgttttcagttcgcgctgttcgcgctcggtcatctctttttgggtaatgcgggggagtgccatacgggtgccctcagttagccgatgcatttagtctacggcaatacgcaacgggcggatagcgtgtaagccgggtaagcttgcgccacccggcaatattttaatttacctttgccgtttcgcccgatttttcaacaatcggtttcccggaccagtaaccagccagtagtgaccctgaaaggttgtgccacactgagaacagcgcgccaggcagcgctgcgagcgggccaaagtagattttacccaatgcagcagcaagaccagagttctgcatcccgacttcgatcgccagcgttcgacaggttgactcatcaaaaccgaacagacgtccaccccagtagccgccaagcaggccaagggtgttatgcaggatcaccgcgatgatcaccataaagccgacggaggcgatatgtgaagctgaacccgcgaccaccgcgctgatgattgccaaaatgcacaccatcgagaatgctggcagataaggttttaccactttcactacgcgcggaaacagatggtgaatcaccaaccccagcgtgattggaatgaccacaatctgtagaatgctcagcagcatacccatcacgtcgacttgaatatgggcatcgacgtacaggcgcgtgagtagtggtgtggcgaccacgccgaccagcgtggagaccgatgaaatggtgactgagagcgcgacgtctcccttcgccagatagatcattacgttagaggcggtgccgctggctacgctaccgaccagtaccatcccggcggacagatctggcggcatcttaaacagcaacgccagcagccatgccgcgagcggcattaccagatagtgcaggaatatccctgcggcgacaggggctggtcgggagagcacgcgtttaaagtcgtcaacgttaagatggacccccataccgaacataatcaacatcagtagtgtcgcgacccacggcccaacaggagtaaaggtggatggtgtgtaatacgcagtgagagagagcagcagcgcccataacgggaacagccgggtaatgacggcgagcatgttgttttccttgcaagtatgttgtgtttgttatcaacgggtcaggatcgagccagaccatagttattgtttatcgcgtgaaggaagattattcaaacaaattacgctcatgatccagtgtgggcacgtggcaggctggatgacgcgcctgcgtcgccatccggcaacgtatcgcccgatggcgcttacgctaccgtattagaaatatatagaggttctggtggcgtaaagaaaagcgccggcattgaagagaaggaagctttaacgcagtgataacttatattgtttcactttgctttggattgtgttttttaaactaaagtaaggcacccagggcaatgctgtgttccaggggcgaggggaaccatgaaaacagactatgcttgctccgtcaggtaattttccattacctgtcccatcgtatagttcagggttaaaaccaatcatttttggtgttgctatattagctttgtaactaataattcttccgggtaagatgttttgccatctttcagcatcttgacatattctgccgataaatccttgatcgccatgatagggtggggttcttatggcattgatttccttttcaggatttttcataaattcatcccacacatttttttttgcgggtgcaggaataaacataatacctgttgctggcgcaactgaagcaccatgctgagaaaagtcattaagtaatgttatttttttcatagttgtcagaggagtaatatctcccacaataacgctatctatatcaatatagagaatatcctcattaccaagaacaggatgcagtggattgaaaagttctagttttgcccaccatcctggccaatcatacaaaagaggcgctgtatttaccccttttatctttagcgcatctgttaaacaaacagaatcataacctttgagctgcttatgtaaccattgagcatgttttgtggtgaagtctttgctttgtctgagcacagaaacaataatcattatattccccggtgaatattaggtgattttagccatgttccactatatttaatgtgctttatattgcaacaaaattagtgttcatatggttatcgaagttttattacattcaagatgtgaatgtaatttatttgtttataatgttattaatatatgtaatgtaagttgataaatgttttaatgattgttttgtcttttatattttcatggggatatataaaataagagttgggatgggagtgatcttatttcccctttttactgctcccagctctatatcaattccaaatttggaatttagcttgcgattaatccataatccagtttttttctgtttttttgaaccatagatatacatctcatttgccagacgccaccaaaataaaaaaattacgacggcgattgttattggcctgcataagtaatcgatataataaaaattcattactgcgaataatctcatgtcgccagtattcccgtaatccatttccttttttagatatggaaaataataagcaatgtaagagtttgattttttcttcctccaatgaagaaagctatcttgttaaataagtgttattatcgtagggggttcacgtatcaattggtaaaaatactataagatggttttttataatacttcatttgctatgcaaactgaacatttaatgctaacaaataataaagggtattattttaattcaacaccgccgggctttatacccggcgagagattcaacaatcgtattgccagctactgactaaggcataaaggtggctgggggagtagcgccagctatcgtttagtccgagaaattcagcgcaaaactcgctgcaaaacagtctatctttgcgctcccggttatacagcgcgataccgagcgcgccctgccagtcatagcgtttgccgttatgtttgcggaaaaagacttccacttccggcaacgtggcctttaacggtagcttatcccacttatcgtccggtaacggtattatctttccccgcacgccgcgatcgcgaaacgacgcggagtagcagaggtattcattaccgccgtgcgccaccgccagttcacagtgagagtagataccgcgcgtgactttgcgcgtgagccagtcggcaaacctggcgatgccgcgatgctccgatcgccccttatagcaggcgagccagacggtggtttgactcatggttgccagcctgtggagtagtcgtaatccagcaccgcttcgatatcctccagcgcctccaccgccgcaatatgccgctgcgcgttggcaaacaggcgcatatcgtgatccatagtggcggtttcaaactgcgcggcgatgtcgttggtcagttcaatcaaaccgttatttttggcctgccacattaaccctgccggaatctgctgtgcctgacccattctggtgagtgacatttgctgaatacggctgttagcatcgctgtggaaatggttgccgtcgataacgatataatcggcggtaacatcatcacggtgagctttgattgcctgtataacttgtgcttttacactttcaagtgctgagacaaataacgcttcgtcatatacccactcgtttccctgtaatcggtaaaattttccgggtggcggtgtagtaataaattcaagagggttaaggcacacccaacaatttttatctcttagtcgccactgctcatcatctatagaaattactgagtcaggtaacactacgtttaatgaagaagtatcaatccagtctataacctcaaaggttgccggatggtaatatgcatattgagtcatatattcaccatgagatttttacaaaaccgctagaaccgcgtccaccagcgtatcctgataaggctatatttaagctgttaaccgacgctccaccaccacctccagctccgtagccactcgcattgcttccgttagataaaactgcgccagttcctcctttcccaaagaaagtagtttcagcattaccacctgatatagagtccaactggttaaaaccgcttaaaggtattcttgactgaacaatgcctcccgctcctcctgcccccccgttggcgacaacatctataaaaattgagtttccaccgttgatcccagaattcccagcctgtcctacttgcaccacgtttccagtagggttgctattaggtaatacaccaccagccccactagcgcccccagcccccacggttactggataattatttcccgcaataacggggacaatagcaatctctggctctccacttttgccagcattaccacctgaacaatagagaagaccatctgtattactcgtatgccctccacctccaccacctccaccgcctcctaacatttccacaaagacctgagtcaccccatcaggtaccgtaaacgtaccgttagccgtaaaaaactgataatgggaatgattagccggagccgctgcgctcgccttgtcatacgccgcctttaccgcgctcggcgtcgccgcctccgtcgtactggtgctgtcggtggcgttattaagcttcacgatccctttttgcgtcagcgtaccgtccggggcgccggtgatctgcccccaagcgtgtgtatgcctagccggagccgccgcactcgccttatccatcgccgccttgaccgcactgggcgttgccgcttcggtggtgctggtgctatcggtggcgttattaagcttcacaatccctttttgcgccagcgtgccgtccgggacgccggtaacctggttccagacgtgagtatggttcgccggagctgccgcattcgccttatccatcgccgcctttaccgcgctcggcgttgccgcttccgttgtgctggtgctgtccgtcgcactgttaagcttaacaatccccttttgcgtcagcgtaccgtccggaacgccggtaatctggttccaggtatgcgtgtgattacgcgcttccgccatcgccgcttttaccgcctttggcgtagccgctttggtttcgtcatcgctgtcggtggcgttactgagctgcgtaaagcctttctgcgttaatgtcgcatccgggtgatttgtcgaatgttcatgctcgtccagccgggtatccacatagtcgcgcgtcgccagcacgatgctcggatcgaccgtcagcgtcaccgccgtggtgttggagacttccataatcaggcggatacaaacctgcttgccacagccgcccggcagcagcggtttgtacgactcagggaatttgccgatggcgatcagctcgccctcgtcgtcgaacacgcccacttcacgcacataccagccgccaacgtcctccggcagcaccagttcggcaatcagccagttgggattattcggcgcaaccgtcagcgtattcatctcgccgcgccagacttcgtggcgtaatttggtctggctggcgatcggttcataatattgcccaccaccgtcgccaaccgccatcttttgcagatgtagctgttttttatccgcaagggcgctggcgattttcgccattcccctgtcggtcaggagggtataaaactcattatccataattactccgggtaaatagatgtaatttcaaggctccattgccctgtaccgaaatagatcggtttagtttgttgaacttccagaacctggaagggtaagacggtcgttatttctccaccgtaaagcgcgctgccaataacaggaatagcgctttggttaattatccagacaattaacgcttccagttttgaacgcacgttcttatattcatgaataagatcgaccagattattaaacagattttcatccatgccctggttgattagcttaatttcaaccttgaagaaataagccttaccgccatactcaaaccattcggaaatcgtgccgggtaaggataatatttccagtacgcggcgaacggcccagggggttcctttatatttatgcagttcaatcgcctgcttaattaactctcgtttctcctgttcattggcagcaaatagccagccttcgagcccctgtacatgaaactgttcggccaacgagggcaatgccgaggcatcaacgatatccaccagatagaccagcaacgccgtcaggtcgatttgcgcgaaacgttcggcggcaatgttcgccagaattgagaaacgttcgtcgctggccagcggcggcggcagaagcagtttatccatcgctgactccggcaatcgtcacgtcaatagccgtacattccgcccattcgtgcgcctgcaatacctttttcgcgggcatatccagcgcgacgtcgtaaacgccatccacttgtagcactttaattatctggtttggcacaatgtcctggcccagccgggtctggcgcgagcgcgtccatgtattaatcgcttcacgcgcggcggcaagcgtcgtctcctgatcggcggtggtaaacagcgtcagccgggcgctgatctgataagccacgcgcggagaacatttagcgctcaccttatcggttagcgggcgctttttctctttgctcacctcccgttcgatctgggcaagaagctccggccccggcagaccgttcagggtcagcggatagagttccacgcagccttccgccagcccttcatccggccccagtaccgccacgtcgataatcgactggctgaccgagagcgtatggaagcgataggcgccatagctgcccgcgttgctgaaactttccggcgctagctggatgcgtttacgtagcgcgtcgtcgttctcttcgccgcagccgccacttgaggccgtcagattggtgacgctgatatcgtaattgcccacgcggtctaccagcgcgctgatttgcgcaggctgccagttgttgccgggttcaccggtcactacacaggttgcagttaccgcaacgctcaggctgcccgcaggcaacagaacatcttcgtcggtggcgaacatcacgctatccgacgcgctggcgcgggtaccctgtggaatcaccaggttacttttagccgcttgagtaacagaaaactgcagcgtggtttttgccgcctgagcgggcagacggtgaacgccaaccagctcgcctaaataatccagcatcggcgcacgggaatacgcgaccaggttttgcttcgctgcctcctggatggcgatgcggacaaggttttcacgataagcaaacaggtcaatgagcagccgctcagcctgcgccgggtagagttttttaccgctggcttcttcatattgcgcaatcatctcgctggtgatttgcgcggggtcgcggtcaataaagtcgggttcggctatcgccataacacctccgttgagttaattacgccgtctgcggcgcgccattgcacgcgtaacgtcaggtgttcgccgtcaatcgtcggcgtcaccttcagcaaccggcagcgaggttcccacatgcgaatcgcttccaccgattcgcgaacaacgtgcggaatggcccgctcgatcgggtaatcgatgtagcgccacagattgctgccaaaaagcggcctgtggggatcgctgccgcgcggcgtgcgcagaatgatgtgtattgcctgatgaatatcatccagcccgcagacgtattcttcaggacgttgcaaggcaggttgccagtgcagggtcgagggtcgtgttttcgtgttcatgaggctattttcgccttccggcggggggagagatattaaagcgctttaaggaaataattgatggcggggtcagaatgtgttttgcccggtggcgcttctgcgcttaccgggcctgtgttgatgcacattttgttaaatggcgaagatcgcgttttacgtaaagttaaaatgaaattgctgtaatttcacctttgtctacagaagcgtagtaccagaattcatcattgatttctgcgtgcttcattttctcaactggaatcgttttctgccgtccattaaccgagagtgtgatcgaacccgttagctgctcccggctgataatagcgaaatccccgcgggtgttgctataagccgtcgtttcattggaaaggctgtgcttcgctccattagcgattacagaataatcaaaattgactttctttttgaaaatagcttgtacatgataatactcgccgtaaacagcaggatcatggaataaaccaaaatgaccaccgctattttgcaacttgacgaaataatagtcagggatgataaacttctgtttacctgccgctatttctttagtaatgattttttgtcttacgatttcctgtccggccgtttttttataaccgttaagcatcaatgaataggaccaaaggaatacgataccacagagaacagtcacggcagttacgccgacgactccagccttaacgccgcttttcaacagggcgtaagcgatgaaggagatagctaaaaggaaaaacataaacgtaccgttcataacccgatcggggtaggacggcgacgcgaacatgattaaggaagtgccaatacctatacatacgactaacgcagcgcagataagggacgttttatcaattttggcgcgaatctgcttattgaatatgaccagtaagaccagcaataacaaaacaacataagctatccagatcagcgccagatggttatgaacgcgttctgttaagtgaatgaaaatacgttcaaaaatcggccttccataccagaattctttgccgctggcgcggatgaaattgcccggagaaagtatcaatacgcatgaacctgcgattgcacagagactataaactatcttattgcgcgaaacagatttgttttgccataactcgtatgcaatggccagaacagaaataagcgagacgaaaggtgagacgctttcattggaacagcctgccataaagcttagtaatgcaacccacgggctgatcgctttactgttttttattgttatggtgtaaaagaagaacagccatgcaacaacgaacagattcgtccacaaataattcgcagcaccaacgatccagaaagtggtttgacccaaattcgggttcgaaatccagtaagtgaagaatattagtgggaataataagtagtcggatttattccagcgtaatgtacctgagggtgtcttcacaatgaaataacaaaataccagtgtcgaaacggctgcgctgatggaatacacgagttgagaacgtgtatacaggatgagtgcgctggtgtaatcagctataatcctgccactccatgtcatataatgatgaaaatgtgattccggcgaaattcctaaaaggtaatagcggtaatcatcagagtgaataggggtataccattcaataagaaaaatggccaaaaaagccagtagtatcatcgccgttttcggtaatatcttgagcatagtgttcattattccatcattgtttttttgtttttcacgatatagcggggtctttgcttcacctccgtgtaaacgcgtccgatatattcacccatgatgcctatgccgataagctggatgccgcctaagaagagaatcgcggtcataagcgaaggataaccaggaacagggtttccccacatcaatttatcaatgatcatccacatggcatatatcagggagagggcagaaacgctcactcctatatacatccagatacgcaaagggaaagtagaaaaacttgtaatcccctccagcgccaggttccagagtttccagccattaaattttgagttacctgcgacacgttcagcacgggcatattcgaccacatctgtttgacctccaacccatgaaagtatacctttcatgaaaaggttacgttctggtaatagcttgatattttctacaatctcgcgcgacatcaatcgaaaatcaccgacattctcttcaatctttggcgtactgattttgttatgcagcctgtagaaccactcagcgcttttacgcttcaggtggccatccgttgaacgatcgatacgcttagccagcaccatttctgcaccagcctgccatttattgatcaaatgtgggattacttcgatgggatcttgtaaatcaacatcgatagggatcaccacatctccggtcgcgtgatctaatccggcaaaaagtgcaggttctttaccaaaattgcgggtaaatgagatcggaacaacaagaggatcggcaacagctaatgcgctgatgattgattcagtcgcatcgtgactcccatcattaacgaagataatctcaacgttataaggtttaagtgaactgtattctctgaccgttttatagaaaatagggatcgcgtcctcttcattaaagacgggaaccactaatgaaattttcatttctcattcctgaaaacaatgaatctggaatataaaaatccgcaaataaggctaattgcggaaaatacaatgagcgtaaaaatgggaggcatagcacacttgtcgcctgtccatcccacgacggcgctcagcacgcccataaaaccgacgtacagcaaataacgtccggttgatacgctggctccaaaggtaaaccgggcgttagcgaaaaaactaaaactgacagcgacagcaaagcccgctacgtttgccaaagcctgacttgtttgaaatccatagacgcaaagggcaaagatagcccaatgcaaagcagtattaagtacgcctatcgaaacgtactttataaataattttatcattatagcaatcaagaagttgtaattcagcgaagtctaccagacaaaactgagaggatcattcctgaacagcagattttatgtaaacagggcgaagttaaagtaaaaaataacgctagttttccaatatacatatatgcaatatttgcagcgcaaagtgattacattttcatcggaaatagcgcgcgaaaagggactaatcacgttgcgctgaaaataaatatcctccagcaatttgcccggtggcgcttctgcgcttaccgggccggtgtttatgcaccttttgcaggctggataaggcgaagccaccatccagcagcaatttgcaggttagtgagagtggtggttagagttgccgccgttgtccatcagcgtgccgctggcgttaacgttgccgaggacattcacgttgcccgtaatcaccgcgctgtttccgacgccgccgctgcctgccataccgccaagccaggtgagttttttcatcacggtaacgtcgccggtaaaggtgctgagcggcgcatcgacggtgacattcagcgctttaatgcccgtatggggcgcttccacgttgacatctaccgccttgacgcccacggaggtggccgccacgtctacggtttctgatatcaccgtgacgtgctgcgccctgacctctacttgcggtgaagtaagctgcgtatgttccttcacttcaatgacgattttttctatgccgccgttgacggtgagctggtgtaacgcacggtcatattcaaaggccgcgccgtcggaaaactgcacgtagcgcttgtcgcgcgaggccagcggcgcggtatccacgctggagtagaccgcgcccagcaccaccccatcctcgccgttgtcgtcgagcgaaacttccacctgttcgccaatatccggcaaccagtaatctttgttgtcctgcgtgttgcgttgcagcaccgcaagccagttactgcgcaggttatcgcactccggtagagtgactctgacgcgcacgaccgcctcatcaatatcgctgataatacccgtctggcgggtaacgcctttcatattgcctccttactggctggttgccggtccgcgtgaaatgtcgatttcggtagtgtagccgccgctgcgcgtgagtttgtgcatggatttatcaatcagccactgcccggaaagtacgccaaaatcgctcagttctatcttgttgcccgccgtcaactgcgggcagcccatcaagctgagcgtgccggtctgctggtattcgttgtggctgtccagcgcggcattggctttagcctgcgccgcgccggtatccggagcgcgactgttgatcttcagggtatcggcgctggtcgccgcaccgcgcgccgaggtcttttcctggctatcatgggtataaataaccagttctttttgcttgctattttgatgctgcacggtggcgtttttgtagatccggttgatggtatctttgaacgtgtagtgcgaaacatccgtccgcctgagcgtcttcaccggcgccagacagcgcagcgtcggcagatgcgaaaagatcagctccgtcgccgtcactttcacggtatagccatattcactcgccagccgtttgagaaacgctacatcggtttcggcatattgcgtgacccgatcaatcgtcagcggcgcaatcttgcccgccagcgttaaaccgtgtttttgcgcgatgcgactggcgatggcggaaagcgtagtctcctcaaagccctggctgtttttggtgcgtagcgctttgctgaccgaggtggcgataccgtcgatattgaccgtcgaaggcggcgcgctgatatcaattttatcaatgacatagattccgcaatcgagcagatcttcgccctggtagcccaggcgcagcgccagcgtgtcgccttttcccggataccattcgtttacccagcgcccggtgctatcttccagcgcaatggcaatgacatccgactcgtttttaatactgtcgctgtaactgatgctggtgacataaggcgcgatgtcgtaagtgatctctttatgtccgtaccaaagggtaaaaatgggcgtcagggtggcgaacaccccgccggataccgttatctcagccatggcggtagctccggggtcgtttgcgtgacgctgataaccgggatgatcagccgcacgcctgacggtaaaaccggcataatagcgacgtgcggattggccgcgatgatgcgttcgtaggccagcgcatcgccgtaatagcgccaggcgagattatcccagcgttcgccgtcggtggtgacatgttcaaggtagcgcattacagactcctcgtaatatcggcagcggcaagctggctcacgtcaggagcgcttgtttgcagcgtgccgcgcgcctgattgaccagcgtcgcggcgctgtcgtaagtcgcttccgcgacgctgctggtgatagcgtcaaacagcgattcggcgtgttcgataagcgtgccggcatcgcccgcgcattcgcggatccccggcaggctgtcgatcagttcctgcattttcgccgccagcgctttcggcagcccggccagcgtttgcaaatccagcggctgctggaacagcgcgtctatcgaactcatggtttttttcagcgaatcgacgatatcgccgcatttttctttcagcgctttggcttccttcaccagttctttcgcctgggcgatcgtttttttgatgtcatcaatggcgtcggccacctcatccatcatctctttggcttcacgcataccctcttcaacgacgctcagcagttcatcgaaccaggaatcgttaacgtcgggaagctcatccaacatctcgtcaatgttcggttcctgggtggtgatggccggaggcagcagcgggctcttcggatcgccggtgtactcctgtagcgacaaactgccgccctgggcaatgacgttaccgtaaggatcggtgtgttggtgggtagcggtcagatcggtaatcacgaaccagccgcgataatcgccgttgccgaacaccagcgccatcgcctggtgcgcggtcatcgcttcccgcagacggttcagctcggtggtcggctggcaatactgactatgaaagttgaatttcagggtgattttgtccagcttatcgccgataaattgcacgcccggtttcccttcaatacgggcatggctggtgtaatccacgcccatcgtactttcaaattcgtcccagtaagcgacgacgtcaaattctatttcgcctaatacggcatacattatgcgtactcccggcgccgttgctgcgccatgacatcgttaatcattctctccagctcgcgtttgctcagcgacagcacgttgttgatatctttggcggcattcgcgccgcttccctgcacggtaacctgcggggaaaagtgtacctgcacgttgctttgcgcgcgggagggcagcgtataaggtttcccgccggatttgccgggaagcgcggctggcgtcggcggcgtggcggcgcttttcgtcttcacaggctgcggcgaggccatcgttttggccgaggttgtcaccgctttcgctcccgatgccagcggcgcgctggcctgttgcgcgaccattgttccggcaataccggggacggcggcggcgacagacggcatttcagcgctgatgcccagcgcgcttttcgcccagtcggggatcagcgcttttatcttctcaatcgccccgctcaggaaaggaagcgcattcagaatgccgttgatcaggctatcgagaatattgccgccaaattcgctgaaactggcggggagttcaatgccaaaccagtccagtacgccggcgaaggcgcggtaaaacaaccccagcggcgaccagtcgagaatcagacgcgtgacgccggcaatgcctccgtcaaaggcggttttgatgcgctcccagactccggcaaagaaaccggaaatcggttcccagtagcgataaagtaaataggcggcgcttgcgatagcggtgatagtcaggccgacagggttcatcagcagcgcccgacccagccagataaacgtctggccgaccagccgtagcccttttatcaggccgtttcccagcagcatcgtcaggcttttcgcaccgttgccaaacgatttcagaaccgacagcgcgcgactgccgccgcccagcgccagaccggctttgaccttcaggaagatatcgatcaggcgaataaacggtgacgcaatgaggtttgctcccagcctgagaatattcagcgccccgttgaacagccagataacgctaacgactttagcgaccccttgcaccagcgccggattttcccgcagccaggcgctgaactgccgcaccagcggcgtgatgctttgcgccagttcgccaatggcgggcatcagttccaggccgacggtcagccacagatcgttaagtgaaagttgtaacgctttggtctgttctccgggcgatgtcattttcgcggcgaagtcatcatcaataacatgttgccccgccgcctgcattgcggaggcttttagctggcgatattcgtccatattcgccagcatcggggcgagaaaatcccgcgtttgcgcatcgccgaacatcgcgccgaggttaaatttctccaccatggcctgtagcgcgtcgccgcgcgcggaaagatcctcaatcttcatggtttgcctgaaggtgtcgaggatctgcgggttcattttctccagttgcatctgcacgatgtgggtcatcgcttccgtcacgccgatcccattttgctgatgctccagcagcgatccctgaagatccacgccctggcgggcaaaccaactgtccgtctctttcgagaaggcggatttcaggaaatggtcgaaattcgctgccgccgcgcctgcgtcaggggcatttttcatggcgatttgcatcgttgcggtcagttccgcaatgccttctttcccctgagcgccggtttttccggcaaaggcgttaatccactgggtttgctctgcaacggagccgccgccgctttttgccacgctgtacagcatattttgcgcaaaacggaagtcgtcaggggcgatgttcagtttgtcgcgagtggccagagccgcctgcgcccagctttgcgcgctgtcgcgggaggcggtcgcggctttggcgatatcgggcatgtagcggctaagatcctgcaatgcgctgacgccgccttcgatcatcgtggcggcggtgctttgcagatctttttgatcttgattgaaatcaaggctccagtcgcggatattcaggctcagggcgtcccgcgcggtgttatccatgccgcccttcgccgccatatcgaccatgttgccctgaaattcgtaaggcagcttccagtcgggagtctcaacgttcaggagcttgccgagctgtccggcgaacgtttgtgttttttccagcaacccggcgcgctgtttatcgttctcttcccggcgaagggcggagttagcgagctgttgcgtaagccgggtgacttttgtttgctcaaagctgagcgtgtgcagcgtgctggcgttgagtgagccgtaacgggctattgcctgcgtcaacgtctcattacgcgcctgaagctgggtaataatgtcgttggccaaaatagtgtctcgtataagttgcccggtaacaggctgcttgccggaaaaaggacagggaaggagtgaaccgggcttgggtcaggaaacccgcaggcattaagcctgcgagtcgtattcgtgtttaatttgcgcgctggcttcgtccagccagcaggtaaaatcgtcaaccgacagcgcgtcaatttcactgggcggaaagcgaaaccacctcgccagcagcgccattgcctgccacagttgctgtgggttctgtagccatgctaagcatggactgaaatcgtttctgcaatgcctgatagtccagcagatccatttccgccagatcttcggttaccagcccggtcatagccgccatcagcggctcatcccactcttccggtttatcgctggcgcgtcgcgcggcgcgcatatcttttaccttcaggcgacgtaattgcagaacgtcgatacgttccccggcggcggaggtaaacgggaactgcagggtatatttttcgttcatggtatagtccttattcgtcgtgttaaattcggggccgtagccccgaagtaattaaccgccaatattattgcggtaggcatttaattgatccgcgccatttacgcggaaaatattcgccagataatccagttcaagaagcgtttcaccgtcaaccacctgtttaatataagtgcagccgaaggcgctgctgaattccgggttttcattctgtttaaacgttcccagcgggttctttttaaacattacggtcatatgcgtcaccagcgctaactgatccgctttaccctgcgagttataacaatcgatgctggagcggcactgcaatgccaccgcctgccacggatttgccgttttacgcatgacgtcgtggtaaaacgagttccatttaatttcaccttccagtttgtcaaaaccggcaggcagttcaattttaccgaccatccccagcgctttatgctcctgcataatcatgctgatatcaggcagtttaatttcactcgcgcgacctaaaagattattaccatcaagataaatattggcgttggtaatacggttaatttgaatttttccagccattagcgattgctctccagagaaactaaatattcagaggtaatttcggtttcaaacgtcagacgttccagcggcggcggcggggtgaatttgtagctcagcaacagatgcccggctgccagttcagtctgttcgttacgcgccgggtcgtaccagcattcaaagcccaacaacgcgccgtcggcaatcagcttgcggccccaggtgttcaccgattcggttagcgcgtcgatcagcgcctgattaatcggcatatccatgtattgctggctaaaatagcgaatcgattcgttaatcacatcaccagtacggcgcacgttctcaaagttacgcatatgagtaaccgtcggccaggcggcggtacggttgccccacaggcgcaaaccggagccatagctgttgaagatggtggtgatgccgttttcattcagttgattcacttcggtttgcggatcgtcgatcatcgctgacagcgagcgctctacgccggtaatgccctgaatttcctgattggagttgctccaccagaagcctttttccagatccactttggcacgcaggccagcggcgcgagaggagagcggctccaggacttcgctgttcgtcgcgctgtcgtacactttaacgtgcggatagcacagacgcgcgcgatcggaactggtattgaagttaatcgccccctgcggaccgcgccctgccagaacctgctggaaagtcgtgccgatgggcgcatcaatgtaggtaatggctcccagcgcttctgcctgagcgataagcttaacggcgaccgagttttgcgtacaaaagaccggcgcaatcaggatcttcgcgtaaaaaccaaactggttccaggtgtcctgtaacagcttcatgccggtacggtcacccgccgtgtttaccgcgccaacaatatcggcggcagtcactttggtggggtccgcgtaagtataatttacataggcctgaacgccgggtttcagattggtccccatgcaggtgattttaccggtcagcatatcaatggtgtaatcggtgcctttgatataagcgtttccggcgttcgtgctgcggccaatgttcatcgtttgcacggccccgtgcttgagttgaatctgaccgttgtcatcaaccttcacggtttcactgggaatggtacttttgtgtaccgccggattcagcacgttaatcaccacgaccgtccctgcgccgtgatcgtagatcgccttcagcgcctgcgggatggtgaaatttgccagacctgggccaaactgtgccgcgtcgctttcagaaaggcacagcgttggctggttaaccgggccgcatggcgcggtgccgatcagaccaataaccgcagatttaaccgccttaaccggacgtgggccggtttcgatctcaatggtctctacaccgtgcaggtaattagctgccatggacaatttcctcttcattagtttctacttcttgcgtaaccactggcaccaggtgacggcgggcaatcatggtgattacccactcgttatcttccggcagcgagatttcgctattgggccacagtaagacttcctgaccgtcggcgagcgtgacgccgcttgccgggccactgtagatatatttcattgaatttcctcataattaacgattgtcagcaggggggagtccttgctttcctgttccgcgataaacagggtgctggcggtcatatccagggcgtaacggcagaagtttgcggcgtcgccgatatatttttcgctttccagccagagcggacgatcacagtcgggaagttcaatgccccccaacgagcgacgtagacgatccagcgcgtttatcgcgtcacttatttgcggaacaataacggtggcggaaatccggattagttgtttttgtaccgtggcatccgtattttctggttcggcaaaaaccgaaccgcagtagtgaattaataccgttacctgctgtcctgttgggatatatactttcgcatcggttgatgaaatatgtatatccatatcagggtttaattcacgtagtctattcgccacggtatgtataacagataatgtttccatatacggttttccttgatttaccgggagagataatattctctcttcgttatcgttcagacgtattttgatgtatcaggcatcaggcgtcttttaatctcctttagagaaaaaagttaaaacaaataaaaaatccccggcgtataaacgacggggatttgtttaatggttacctcgttgaatcagttctattttgctatatagcgcatccagttttgcttccagaacggcctggccgcgaagataatcctcgcggcggacataatgcagcggtaaatcggcgcgaaattccagaaattctctctccagcctggaccagcccgcttctgattcgcgccgggcagcttccagtgcttcaaaacgttcattcagccgtttttcaatttgcgccagcagcaatttaccggcagcaaacattaatccaacaaacgaaagtaagagggagatgacttcccaaaaatcgatactgagtttcattactccctctgattaatgaatgcagctagcctgcccccattgcaaataacggggagcatgttggtataaaatcgctttggggtagtgacgattctcgcgccagtttgcggcgctgcgcccggcgttaacgcgttctacatgttcaaaccagatggacgcatccaacccctttgcggcggccagctttttatctctgttcacccagccttgcccgccgttataggcgctcagagtgaaagccattcgctggcagctattttttgctaacacgcttttccacaactggcggtcatactgtaccagcgcgcgtatcgcccaggcgggattaaacggcttgttttcgtggagttccgggtacaactggctcacccattttgccgtcgcaggcataaattgcgccataccctgcgcgccagccggagaaagcgcgtcaggcgcccagccggattcctgatgtagttgcccggcaaaatcagcaacgggggcgttaagcccccagatttcgcgcgcggtacgaatcacttcgttgcgccattgcagggaagcgcgcggcggttcggcagcgtcggcagacaagaaagtcatagcgcagaccaggcatacgtattgataacgcatcgttacagccccagcgcgacggcaaggcaaattgccgcaacgatgatcgcgcgacgaatcatcgccgcggcgcagcacagcgattcttcccaggggcaaaaggagtcgggacgtgcccaggggaaaagactacggtcgagccagtaacccagcaccgctgataacgaaaccaggctgagtttatagatgacgaccggaatttgcgctgatgatgtccagccgataagcgcaaacagtacgacagaggcaaccagccagccggaaagtcggggaacaataatttttcgcatactctatctcctgataattgagagagaagtatcgcttttccccatagtggaagaacgaaaagggctttaataaataactttaaaaaatgtttagcgcatggcgtcaaatgccaacaaataaacgaataaataaagctttcggggcagggggtagaggttgcctgcggagagtcagtatgtgtctgtggcaggctacgatggcggtattgctgcgtcataataatctttgattaaaattatcttattgatttttaaagtcagtttaaaaattcacgcgattgtgaggaaagcaatctttttgatcgaacgcagaaaaaaatgcaaaaaattaactgtatatgcatacagtattgtgtaaaatgatgacatcagtgaaggcttacttcacctataaaataaatacatattataaattgaaaacgatatatatatttttttaatttataattaaatgcgttgatagtaaatatttatatatattttgaatgtattgataggtagttattgcaccgttttttacgcttccctttttggtgccgtcacggggagcatggtgctggatatggagataaaatatgattcagaaatcaaaagaaatggttcggcttccggagattattaacgatctggcgtttcatgcgtcgcaggtgcttattgaaagcatgaatattgatagcgcgtcagccgaaaatgccggtcaggcaattgctgacagaatgatgcgcaactggggcgggcaaagcatttattttcccaaaggtatctctggtcgggcttcggaacgggattatcagatttacagcgagtgcgatgggcgtaattatgcggagctggccaaaaagtacaatttgacactgcagtggatctataaaatcgttaagcgggtccacacggaaaaacagcaccagcggcgtatgctgtaagcgatatcgggtatggcgtatagcgcgacaagcgctatacgccgggagcagcgacaggccggataaggcgcctgcgtcgccatccggcagcgtattgcctgatagcgctcacccgctgccgtgtcagggcgattattcaaataagttctgatgtagcttttgcaccactttctcggcatcgtctcccggcacgaggaagcacagattgtggctggaggcgccgtaacaaatcatgcgaatgttgaacggttccaggacgccaaacacttctttaccaacaccgcaggcttttgacaggttgttgccaatcagcgcgaccagcgccagtccttcttcaacttcgacccgacacagcgcggaaagctccatcaataaggattgggtcagtaacgtatcgcccgtggaggtggagccggtagtatccagcgtcagcgcgacgctcacctccgaagtggtaatcagatctaccgaaatattatgccgcgccagaatgccgaacacctctgccaggaaacctcgtgagtgcagcatattcaggctgtgcagcgtcaatagcgtttgattgcggcgcagcgccagcgcgcggaacagcggcgggttttgggttttattgcacaccagcgtaccgcccgcttgcggatctttactggagccaacgaagaccgggatatcgctacgcacggccgggagtaaggtggctggatgcagtacttttgcgccgaaggttgccatctccgccgcttcttcaaagtcgatttcatcaattcgctgcgcgacaggcactacgcgcgggtcggtggtgtaaataccgggcacatctgtccagatatcaacccgcgcggcgtggagcgcttcagccagcaacgctgccgtatagtcgctgccgccgcggcctaacgtcgtggtgcggcctttgctttcactgccgataaagccctgagtaatgaccaacgtttcgctcaggcgcgggagcaactgctgcgcggccagttccgcaagcgctgcgacgtccggttccgcacgaccaaagcgatcgctggtacgcatcactttgcgcacgtcgaaccagtgggcctgtacgtcgcgttcacgcaggatctcaacaaatagcagggtagacatcagctcgccgtggctgaccagttcatcggtcagggctgccgatgtcgccagcgatgccgcctccgccagaatagtgatgttttccagcaggcgttcaatctcttcgcgaatgacattcggatgacgcagacgatcaaggatatcgaactggattttacggatggcgtcgagcgtagcgaaacgttcgccgggctccatcccttcggccagcgccaccagcaggttagtgatgccggcagacgcggaaagcacgactaaacgaacattggtgtcggaaagtacgatatccgcgctacggttcatggcgtcaaaatcagcgacgctggtaccgccaaatttggaaacaacgatctctgtcatatcaacctcgtgtcaggaaatgaaaaacgcgaccatggcacaagggcagaacagaaaccggtgcaggcgcaaatgcaagtaacgtatttataaataaaagttgtggcctggactgtcaacgttgggattatgcggattttttatgctgagtttaggctcagtaacagcgcttataaccccgatacccatttgccgcctttctgcacctctaattatttagggtatatactttttatcctcattcgacagtgcctggggcaacggcactaaaacaatcacacttttctgtgactggcgttacaatcgatcccagtcacaattctcaaatcagaagagtattgctaatgaaaaacatcaatccaacgcagacttctgcctggcaggcgctccagaaacactacgatgaaatgaaagacgttacgatcgctgagcttttcgcgaacgatagcgaccgtttcgctaaattttccgcgacgtttgacgatctgatgctggtggatttctccaaaaaccgcatcaccgaagagacgctggcaaaattacaggatctggcgaaagagaccgatctggccggcgcgattaaatccatgttctccggcgagaagatcaaccgcaccgaagaccgcgccgtgctgcacgtggcgctgcgtaaccgtagcaatacgccgatcattgtggacggcaaagatgtgatgccggaagtgaacgccgtacttgagaagatgaaaactttctcgcaagcgattatctccggtcagtggaaaggctacaccggtaaggccatcaccgacgtggtgaacatcggtatcggcggttccgacctcggcccgttcatggtgaccgaagcgctgcgtccgtataaaaatcatctgactatgcacttcgtctctaacgtcgatggtacccacatcgctgaagtgctgaagaaagtgaaccctgaaaccacgctgttcctggtcgcgtcgaaaactttcaccacccaggaaaccatgaccaacgcccacagcgcgcgcgactggttcctgaaaactgcaggcgatgaaaaacacgtggcgaaacactttgctgcgctctccaccaacgccaaagcggtcggcgaatttggtatcgacacggccaatatgttcgagttctgggactgggtcggtggtcgttactcgctgtggtctgccatcgggctgtccattattctgtccgtcggtttcgacaactttgtcgagctgctttccggcgcgcacgcgatggacaagcatttctccaccactccggcggagaaaaacctacccattctgctggcgttgattggcatctggtacaacaatttcttcggcgcggaaaccgaagccattctgccgtatgaccagtatatgcaccgtttcgccgcctacttccagcagggtaacatggaatccaacggtaaatacgttgaccgtaacggcaacgccgtggattaccagacaggcccaattatctggggcgaaccaggcaccaacggtcagcacgcgttttatcaattgattcaccagggtactaaaatggtgccgtgtgattttatcgccccggctatcacccataacccgctatccgatcatcatcagaagctgctgtctaacttcttcgcgcagaccgaagcgctggcgtttggtaaatcccgcgaggtggttgagcaggaatatcgcgatcagggtaaagatccggcgcagcttgaacacgttgtgccattcaaagtgtttgaaggcaaccgcccgaccaactctatcctgctgcgcgaaattacgccgttcagcctgggcgcactgattgcgttgtatgagcataaaatctttacgcagggcgtcatcctgaacatctttactttcgaccagtggggcgttgagttgggtaaacagttggctaaccgtattctgccggagttgggcgatgataaagctatttcgtcccatgatagctctactaacggtctgattaaccgttataaagcctggcgcgcctgatggcactgcgcttatccggtctacgtaatgcatagcgtctgtaggccgggtaaggcgtttcgccgccatccggcaaaaagagaataagataataaaaaggccgatattcacatcggctttttttataagataattccgcttgtccgtctttatccccacagttttatattgagcttaatcctaaaataagcaataaccagaaaatcactctgcgttattttcagattatacggatgctgatgtcttttagtttaattttaacttattgattttatttgtttgttaattaaataatgtaggcgttacttctttaaagtttaattatcctaaaacttcgatgttatttctcccggacataatccgcctgctttggttgtgtatactcggtagcgcccgaaattcttttgggtaaatctccattcattcaatgaagggaagttatgatgaaaaaagtactgtatggcatttttgccataaccgcgcttgcggcgacatctgtctcggcagcccccgttcaggtgggtgaagcggcagggtcggcagcgacgtcggtatcggcgggaagctcctccgctaccagcgttagcaccgtaagttcggcggtgggcgtcgcgttagcggcaaccggcggcggcgatggttccaataccggaaccacgaccaccacgaccaccagtacccagtagtatcggtacgtttaaccataaccacactccggtgtggttattttgcccctctggagaagcgtcgtgaagcgactcgcacttatcctgatttgcctgctattacaggcgtgttcggccaccaccaaaggcctgggcgattcactgtgggacagtttgttcggtacgccaggcgtacagctaacggatgacgatattcaaaacatgccttatgccagccagtacatgcagcttaacggcggtcctcaactgtttatggtgctcgctttctcggaaaacgggcagcagaaatgggtgacgcaggatggcgcgacgatcgtgacgcagcatggccgtctggtcaaaactctgctcggcggcgacaacctgatcgatgtgaataatctggcgaccgacccgctggcgaaaccaggacagattatcgatggcgcgacctggactcgcaccctgggctggaccgaacatcgccaggtgcgttacgccaccgcccgttccgtttttacatggcgagggaccgatagagtgaacgtcggcagtgaggaaaccgccgtgcgggtgttagatgaagaagtgacgaccgatcaaacgcgctggcgtaatcgctactgggttgatagcgaaggccaaattcgccagacggaacagtatctgggcgcgaattactttccggtgaaaaccacgctgattaaggcggcaaaatcatgatgaaaaggacgataagcgcgctggcgctggcctttgtcgcgtcatccgcctttgccagcggcactgttaccgtttttacccagggtaatagcgagcctaaaacgctgacagacgctgagcgtctgctcgatttagtcggacagccgcgcctggcaacgagctggtggcctgcggcggtgataggcgaagaacaggcgaccgtgacggcgcgtcagcagcaacaggaacttctcgggcggctggcggtgctcagcgctgaggaagacggcgatgctgcggcggcgataaacacactgcgccgacagattcaggcggtgaaggtgacgggcagacaattcgtgaatcttgatcctgacgtggttcgggtgagcgaacgaggtaacccgccgctgcaaggtcactacatgctctgggtcggaccgcaacccacgcaggtgacgctctttggcttgattagccagccgggcagccagccgttcgtccctgggcgggacgtcgccagttatctcgaggatcagcgcttactcagcggcgcggatcgtagctatgcctgggtggtttaccctgatggacgcagccaaaaagcgccggtggcttactggaataaacgtcatatcgagccgatgcccggcagcattatttttgtcggttttgccgattccctttggcgcggcacgccggaggcgataaatgccgacattcttcataccctgacgcagcggataccggaataatgaaaaaaacacatctgctcagcgtgctggcgctgggtattagcgcggcctgccatgccgaaacatatccagcccctgttgggccttcacaatctgactttggcggcgtgggcctgctgcaaacgccgacagcgcgtatggcgcgtgaaggggagatgagcctgaactatcgcgataacgatcagtaccgctactactcggcttcggttcagcttttcccgtggctggaaaccacgttgcgctataccgatgtccgtacgaaaaagtacagcagcgtggaatcattctccggcgaccagacttacaaagataaagcgtttgatgtgaaactgcggttgtgggaagagagttactggatgccgcaggtggcggttggcgcgcgcgatatcggcgggacggggctgtttgatgcggaatatattgtagcgagtaaggcctgggggccgtttgatttttcattaggtctcggctggggctatcttggcaccagcggcaatgtgtctaatcctttctgttcgtatagtgataaattctgttcgcgtgataacagctacaaagaggcaggttccgtcgacggtagcgatatgtttcacggcccggcctcgctgtttggcggcgtggaataccagaccccgtggcaaccgctacgcctgaagctggagtatgaaggcaataactatcagcaggattttgcgggtaaactggagcagaagagcaagtttaacgtcggcgccatttaccgcgtcaccgattgggccgacgttaacctcagctacgagcgcggcaatacctttatgtttggcgttacgctgcgcaccaatttcaacgatttacgtcccgcgtatcatgacaattcacgcccgcaataccgaccacagccgcaggatgccatcctgcaacattcggtagtggctaatcaattaacgttattgaaatataatgccggtctggcggacccgaaaatccaggtcaaaggcgatacgctatacgttaccggtgaacaggtgaagtaccgcgactcccgtgaagggatcgtgcgcgctaaccggatcgtcatgaacgatctgccggaggggatccgcacgatccgcgtgacggaaaaccgccttaatctgccgcaggtcaccactgaaaccgatgtcgccagcctgaaacgccatctggaaggcgaaccgctgggacatgaaactccgctggcgcaaaaacgcgtggagccgatcgtgccagagagtactgaacagggctggtatatcgacaagtcgcgcgttgattttcatcttgatcccgtgctgaatcagtcggtaggcggcccggaaaacttctatatgtatcagttgggcgtaatgggaactgcggatctgtgggtcacggatcatctgctcaccacgggcagcgtgtttgccaatatcgccaacaactacgacaaatttaactacaccaatccgccgaaggactcgcatctgccgcgggtgcgtacgcatgtccgtgagtatgtgcagaatgatgtttatgtgaataacctacaggccaactacttccagtattttggcaatggtttctatgggcaggtctacggtggttatctggagaccatgtttggcggtgccggggcggaagtcctgtatcgcccggtagacagcaattgggcgtttggcctggatgccaactacgtgaaacagcgtgactggcgtagcgcgcaggatatgatgaagtttaccgattacagcgtgaagaccggacatttgaccgcatactggacgccgtcgttcgcccaggatgtgctggtgaaagccagcgttggtcagtatctggcgggcgataaaggcggtacgctggagatcgccaaacgcttcgatagcggcgtcgttgtcggcggttacgcgacgattaccgatgcgtcgccggatgaatatggggaaggggattttaccaaaggcgtatatgtttccgtgccgctggatatcttctcgtccggcccaacccgaagtcgtgcggcaattggctggacgccgctgacgcgtgacggtggtcaacagcttggccgtaagtttggcctgtatgatatgaccagtgacaggagcgtaaatttccgttaatactcaggccggataaggcgtttacggcgctatccggcaaattatcttattgaacaaaatataaacataaataaaaaatatagatgcccgtcacatttgtgcgttatacagaaacctcgccgcagagaaagagggggctgttatgatgccattatcgcgctcacgtcttgagtttatcgccacgattttacaaaacgtactaaatttggggctgcttaccctcggtctgatcctggtcgtttttctcggtaaagagacggttcatctggcggatgcattattcgcgcctgagcaagccagcaaatatgaactggtggaagggctggtgatctactttctttatttcgaatttattgcgctgattgtgaagtactttaagtctggccttcactttccgctgcgctatttcgtgtacattgggatcacggcgattgtgcgtctgatcattgtcgatcataaaacgccaatggatgtattactctattcggcggcgatcctcctgttggttatcacgttgtggttatgtaattcgaaccgactacggcgagaataggcgtcgccacaccgtaacggacgtatggcgtggcaataaattagccgctgtctataacgcataaaaaaagcgctccgaagagcgccaaaatacgaccataagtggggataacataacttgagggcagtggcattgcccgttgccgggcaggtacttcgataaaacttaacctttcacaccccctgccgtcaggccgttgaccagccaacgttgcgccaacaggaacaccagggtgataggaatagctgaaaggacggcggcggcggcaaagtcgccccacaggtagttttgcgggttgagatattgctgcatacccacggccagcgtatagctgtccacatcgcgcagtaacaacgaggcgaccggaacttcggtaatcgctgcgatgaacgacagaataaacaccaccgccagaatcggtacggaaagcggcagcagcaccaggcgaaacgcctgccacggggttgcgccatccagcgcggcggcctcttccagcgaactgtcgatagtttcgaagtagcctttaatcgtccaaacatgcagcgcgatgccgccaagataggcgaagatcacgccgccatgcgtattcagcccgataaatggaatgtattgtcccaggcgatcaaataacgcatacagcgctaccagagacaaaaccgccggaaacatttggaaaatcagcatccctttgagcagtgttgctttacctggaaaacgcattcgtgcgaaagcgtaggcgcaggtggtggagagcgccacgatgccgatggcggtaataccggcgattttcaccgagttccacagccacagcaggaccgggaagggaggcggcgttacccgaccatccgcatgttccacgctgaaacccagcgccagccgccagtgttcccaggagattttatccgggatcaggcttccggtggcgaagttcccttcacgtagcgagatagcgatgaccatcagcagcgggaacataatcgctgcgatgaaaatcagcagccccaggtgcgtgatgaggagacgcagtttctgagatttgggttggaccatagccattgttattatctcccttaatcaaacttcatacgcgtggctttcaggttcactattgccagcgcgcctaccagcaggaagatcagcgtggcaatggccgccgccagaccgaagtcctgaccgccgccgccttcaaaggcgatacggtaggtgtagctgacgagtagatcggtataaccggcaggcgtggtggtgccgagacggtctggcccgccgttggtcaataactgaatcaggacaaagttattaaagttaaaggcgaagctggcgatcatcagcggcgttagcggcttaatcagcagcggtaaggtgatcttaaagaaattctgaaatggaccggcgccgtccattgcggaggcttcgtacaggtcatccggaatcgctttcagcagtcccatgcacaggatcatcatgtagggatagcccagccaggtattcacgataatcaccattgcccgcgcggtgttggggtcgctgaaccaggcaggtttaatgccgaacagcgcgctcagcatcatattgatttcaccaaagctttggttgaataaccctttgaaaatcaaaattgaaataaacgacggtacggcgtagggcagaatcagcaggacgcggtagatagctttacctttcagcgcttcccactgtacgaggcaggccaataccatcccaaccgccacggttaacaccacagtgaggaccgaaaagaccacggtccagacgaagatagcgaaaaagggcttctggatcccttcgtcggtaaagacgcgcgtaaagtttttcgcgccgatagtaacggtataaccaggactgagtttttcatcaccccagcttccgtcggcgttgatcgactgataataaccgctatcgttgtttggccggtattttacgccgctctggttattggtcagcaggccgtcatcagccagtgtgtacagcggacgggtaccggaaaactgacgcagcgagctcataatcactttactttcatccggcaggacggcggttatctggttcaacgccagacggttctgggtgattattcgcagattggcgcgttcgccgcccggcagggcatcagtctctttcagctgtaatttttgttcgccgccgaaggaaaatgcgtcagacaggtaatgtttgcccgtttctccgtcggtgagggccagttgccactcgtcgccggtcgggtaaagaccgaagttataggtttttcctgcctgataagaacggtccatcagcacttgctgggcgcgttcaaaggtgagctggttggtgctgctgtagttagtaaaggcgatagcgatggtgcacaccagcgggaatagcacaaacagccccatgccggcgaggccagggtaaacgtagcgccaggcgtaggttttacgatttgcgaaaatatacaggccagcagagcttaaaatcagcgtcatgatggcgaacagatactccccttgtacgtacattaaaactacaaggtaacccaccagcaggcccagcagaccaattactgaccatttaagctggtcgctttgccaccagtgtttctttttaatgacatccatgggggttttcctctacagcgttgaaacttcctggccggagatgtgcctgatggcgctgcgcttatcaggcctacggtgtgttgtaggccggataaggcatttatgccgccatccggcacaggctcacggcattacttagtgatacggctttgtgcatctttcagcgcggcatccacggtttgacggccgctggcggcgttgatcacagccgtacgtaccgcataccagaaggcggacatctgcggaatattcggcatgatctcgcctttctgggcgttatccatggtggcggcgatacgggggtctttcgctaactgctcctggaaagatttcagcgccacggcgcccagcggtttatctttgttcaccgcttccagaccctgatcggtcagcaggtagttttcgaggaactctttcgccagctctttattcgggctggcagcgttaatccccgcgctcagcacgccgacgaacggtttcgagggtttacctttgaaggtcggcagcagggtgacaccgtagttgactttgctcttgtcgatgttcgaccatgcccacggaccgttgatggtcattgccgtttcgcctttattgaaggccgcttcggcgatggagtaatcggtatcggcgctcatatttttgttcttgatcatatcgatcaggaaagtcaggcccgctttcgcgccggcgttgtcgacaccaacgtctttcacgtcatacttgccgttttcaaatttgaacgcgtaaccgccgtcagcggcgatcaaaggccaggtgaaatacggctcttgcaggttgaacattatcgccgacttccctttcacttttagctctttatccagcgccgggatctcttcccaggttttcggcgggttcgggacgaggtctttgttataaatcagggagagggcttcaacggcgatggggtaggcgatcagcttgccgttataacgtaccgcatcccaggtgaacggatagagtttgtcctgaaacgctttatccggagtgacctccgccagcagaccagactgcgcgtagccgccaaaacggtcgtgcgcccagaagataatgtcaggaccgtcgccggtggctgccacctgcgggaatttctcttccagcttatccgggtgctcaacggtcactttaatgccggtgtcttgctcaaattttttaccgacctcggccagaccgttataacccttgtcgccgttgatccagataaccagtttaccttcttcaattttggcgagagccggggcggaaatcatcatcgtcgtaagtgcggataatgcgaggatgcctacgccagttttaatcttcatatctcccatcctttttggtgatgtacacagaggtggtttaacggtctctagtttctttatacgacaacctctttccatcctccccgcccctacgccccaccccggctttatgtgatctgtgttgcataaatgtgagtaatgcgtgctggcgcacacaaaaacacgccgatttttgcgggcggcatcacgaaattccttttctgtccgcgcccgtggtctcaggtgttgtgtcctcatcctcccgcctcctcccccataaaaaagccggggggtggaggatttaccccagtcagggatcgcgcatagtcaggccatcatgaatgttgctgtcaatgacaggttgtaacgaagggagaagggcatggcgagcgtacagctacgaaatgtaacgaaagcctggggtgacgtggtggtatcgaaagatattaacctcgatatccatgacggggagttcgtggtgtttgtgggaccgtcaggctgtggtaaatcgaccttgctgcgtatgatcgccgggcttgaaaccatcaccagtggcgacctgtttatcggggaaacccgtatgaatgatattccgcctgccgagcgcggcgtgggcatggtattccagtcttatgcgctctatccccatctctccgttgcagaaaacatgtctttcggcctcaagctggcgggcgccaaaaaagaggtaatgaatcaacgcgtcaaccaggtggcggaagtgctgcaactggcgcatctgctggaacgtaagccaaaagcgctttccggcgggcagcgtcagcgcgtagcgattggccgcacgctggtggcggagccgcgtgtgtttttgctggatgaaccgctctctaacctggatgccgcgctacgcgtgcagatgcgcattgaaatttctcgcctgcataaacgtctgggccgcacgatgatttacgtcacccacgatcaggtcgaggcgatgaccctggccgacaaaatcgtggtgctggacgccggtcgcgtcgcgcaggtcggtaagccgctggagctgtaccactatccggcggaccgttttgtcgcgggcttcatcggctcgccgaagatgaacttcctgccggtgaaagtgaccgccaccgcgattgaacaagtccaggtcgaactgccgaatcgccagcaaatctggctgccggtcgaaagtcgcggcgtgcaggtcggcgccaatatgtctttaggcattcggccggaacacctgctgccgagcgatatcgccgatgtcaccctggaaggcgaagtccaggtggtcgagcagttagggcacgaaacacaaattcatatccagatccccgccatccgtcaaaacctggtttatcgccagaatgacgtggtgttggtagaagagggcgccacattcgctatcggcctgccgccagagcgctgtcatctgttccgcgaggatggcagcgcatgtcgtcgtctgcatcaagagccgggtgtttaaggcctccataaaaaaacgaaacgcaaaaccattcgcagttttagaaggtggcagcgtttaaagaaaagcaatgatctcaggagatagaatgatgattactctgcgcaaactcccactggcggttgctgtcgcagcgggcgtaatgtccgctcaggcaatggctgtcgatttccacggttacgcccgttccggtattggctggacgggaagcggcggcgaacaacagtgtttccaggcaacgggtgcccaaagtaaataccgtctcggtaacgaatgtgaaacctatgcggaactgaaactgggccaggaagtgtggaaagagggcgataagagcttctatttcgacaccaacgtcgcctattcggttaaccagcagaacgactgggaatcgaccgatcccgccttccgcgaagcgaacgtgcagggtaaaaacctgattgaatggctgccgggctctaccatctgggccggtaagcgcttctatcagcgtcatgacgtacacatgatcgacttctactactgggatatttcaggtcctggcgcaggtatcgaaaatatcgatctgggcttcggtaagctttcactggcggcgacccggtctactgaagcgggcggctcttacaccttcagcagccagaatatttatgatgaagtgaaagataccgctaacgacgtctttgacgtacgtctggctggtctgcaaacgaacccggacggcgtactggagctaggcgttgattacggtcgcgccaatacgaccgatggttataagctggctgatggggcatcgaaagacggctggatgttcaccgccgaacacacgcaaagcatgttgaaaggctataacaagtttgtcgtgcaatatgccaccgatgccatgaccacgcagggtaaaggccaggcgcgcggttccgacggttcttcatctttcactgaagaattgtctgatggaaccaaaattaattacgccaataaggtcatcaataataatggcaatatgtggcgtattttggatcatggcgccatctcgcttggtgataaatgggatttgatgtacgtcggtatgtaccagaatatcgattgggataataacctgggtactgagtggtggaccgtgggtgtacgtccaatgtacaagtggacgccaatcatgagcaccctgctggaagtcggctacgacaacgtgaaatctcagcagaccggcgatcgtaacaatcaatataaaatcaccctggcgcaacagtggcaggcgggcgacagcatctggtcgcgtccggctatccgtattttcgccacctacgcgaaatgggatgagaaatggggctatatcaaagacggcgataacatttcccgttatgccgcagcgactaactccggcatttccaccaacagccgtggcgatagcgatgagtggaccttcggcgcccagatggaaatctggtggtaatacgatggtcatctgacgtaacgaggggcgcaagcccctcggaaacatcaggtctgatgatgcttgtaagccgaataaggcgccagccgccattcggcgatatgtttgggttggcgcgctattgcctggctaccgctgaacccgccttattgaggtgagaataatgaaaatgaagaaaagtctcgtcgccctctgtttaaccgcagggctgttcgccagcgtgccgggtatcagcctggcggaagtgaactatgtaccgcaaaataccagcgccgcgcccgttattcctgctgctgcgctacagcaattaacctggacgcctgtagagcagtcaaaaacgcagtctacccaactggcgactggcggccagcgccttgacgtcgccggcattaccggcccggtcgccgcttatagcgttccggcgaatatcggcgagctgacattaactctgaccagcgaggtcaataagcaagccagcgtttttgcgccaaacgtgttgattcttgaccaaaatatgacgccttcggcgttcttccccagcagttactttacttatcagcagccgggcgtcatgagcgcagaccggctggaaggcgtgatgcgcctgacgcctgcgttggggcagcagaaactctatgttctggtgtttacgaccgaaaaagatcttcagcaaaccactacgctgctcgatccggcaaaagcctatgccaaaggcgtcggtaactctatcccggatattcccgatccagttgctcgccataccactgacggcgtggtgaaactgaaggtgaaaaccaacagcagctccagcgtattggtcgggccgttgtttggctcgtccggtaccgggccggtaacggtaggcaataccgccgcgccggtcgctgcgccagcgccagtcgcgccgaagaaaagcgagccgatgttgaacgatacggaaagctactttaataaagcgattaaggatgccgtagcgaaaggcgacgtcgataaagcgctgaaactgcttgatgaggccgaacgtctgggatcgacatctgcccgttccacctttatcagcagtgtaaaaggcaaggggtaattatttccccacagtgctgattttgcagcaactggtgcgtctcctggcgcacctttttttatcatttcatgcgaattgttatttttttgttgcgcaacagatcacttaattgtgattgcgccccccgtaatgtcttttctgagatacaatgactttaggttatgaatcggagagtaaggcatgtcacaccctgcgttaacgcaactgcgtgcgctgcgctattttgatgcgattcctgcgcttgaaccccatttgctggactggctgttgctggaagattctatgactaaacgttttgagcagcagggaaagcgggtaagcgtgacgctgattcgggaagcgtttgtcggccaaagtgaggtcgaggaagcatcaggtttactgccatccgagtcccgctactggttacgtgagatactgctttgcgctgacggcgagccctggcttgccggacgtaccgtggtaccggaatccacgctgtgcggacctgaacaggtcttacaacatctgggtaaaaccccgcttggacgttatctatttacatcatcgacactgacccgcgattttattgaaattggacgcgatgcaacgctgtgggggcgccgctctcgactgcggttgagcggaaaaccgctgttgcttaccgagctttttttacctgcatcgccgctgtactgagaggaagataaagatggagtggagtctgacgcagagtaagctgctggcgtttcaccgtttgatgcgtacagataagcctattggcgcgttgctgctgctctggccgacgctttgggcgctatgggtggcgacgccgggtatgcctcagctgtggattttggcagtttttgtcgctggcgtgtggttaatgcgcgcggcgggctgcgtggtaaatgattatgccgatcgtaaatttgacggacatgtaaaacgtacggtcaaccggcctttacccagcggcgccgtgacagagaaagaagcgcgcaacctgtttgtggtgctggtgctgctggcgtttctgttggtgctgacgctgaacgccatgacgattctgctttccgtggcggcgctggcgttggcctgggtttatccctttatgaaacgctacacccacctgccgcaggtcgtgctgggggccgctttcggctggtcaatccccatggcgttcgccgcggtgagcgaatccctgccgttgagctgctggctgatgttcctcgccaatattctctgggcagtggcttacgatacgcaatatgcgatggtcgacagagatgatgatatcaagataggcattaaatcgacggcgatcttgtttggtcgttatgacacattgattatcgggattctgcagcttggcgtcatggcgttaatggcgctgatcggctggttgaatggtctgggatggggatattactgggctgtgctggtggcgggcgcgctgtttgtctaccagcaaaaactgattgcgaaccgtgagcgtgaagcctgctttaaagcctttatgaacaataactacgttggcctggtgctatttttagggctggcgatgagttactggcacttctgatgtcatgccgggcggacccggcctacaaagccaaaattttcaatacgtcatatcagttgcccgataagcttacgccatcgggcatttcaggcactggcttactcgccctgcgtcgcgctttcaatcgtcagacggacatcagaggtaatcagatcggcaagcatctgatatatcttcatcgtttctgccggttcggcatcgcccgtatcactgatataaccctcatcccgtagcgtcaacacgagtgaactgaacaccgctttgtcgaaaaactccggcgcgttaataccgtgcaggacagacagacgttgcgccacggtacggctttctttctccagcgtactgcggttgatggacggattggcgctcaacagccagaacgtaatggcataacgctgtagcgtttcgcgcgcgcctgccgccagcagttgcagcgtaccggaatgcgtcgggttgatatgcagttcatcatcctgcagggtaattagcccctgacgctgcatttcactggccagcgcgtcaatgaccgaggctaactcctcgcgctcccagcgcaggaacagctccgcttttaacatcggatagagcgcttcaacatgctgctgcaacgcatcacgcgaaatgcgacgatgctgggtgataatcgccgccatcagcgaaggcataatcaacatatgcgcgatattgttacgatagtaggtcatcaacaccgcctgctcgcgcggcagaatgatgatatcgccaatggtgtctttctcgacctcaaacttattcatctgcagcgcgtgagcgataagctcgccagcgctggcggcaggaacggttgagtctgtggaataagggacattgcgcatcagatcgagatagcaatcaagctgctcggtgagctgctcgcgggtgagcgagcgctgacgcgacgctaacagcgcggtacaacacaggttcatcgcgtttgccgcgccagcgttgttaatacgcaccatcagatcggcggcgatactatttaccgtcggcgtcagccaggctgggcgtatggcctctatagggtcgatagattcgcgccactccggcacatgctggttcaggtacgtcatgagcggcatcggttcgccaaagttaacgtagccctgacccagattgcgcagcttgctcaagcctttcagcatctgcggcaggctctctttctcttttgtcgcgccgcgcagttctttcgcataggtgcccacttccatgacgtgctcatagccgatgtaaataggcactaacgtaattggacgggtaccgccgcgcagcatcgcctggatagtcatcgacagggtgccggttttcgggtctaacaaacgtccggtacgcgaacgtcctccttcgacaaaatactcaaccgagtaaccgcggctgaacagttcgcccaggtattcgcgaaagacggtggaatagagtttattccccttaaaggtgcgacgaataaagaacgcgcccagacgacggaaaatcgggccagcgggccagaaattaaggttaataccggcggcaatgtgcggcggaaccagtccctggtgatacagcacataagaaaggagcaagtagtccatatggctgcggtgacagggtacatagacgatttcatgcccgtcgtgcgccagttggcgtacgcgctcggcgttatgcacgttaattccctggtaaagtcggttccaggtaaaccccaaaatcctgtcggtcaaacgaatcatctcgtaagagaagttcgccgcgatctcttccatcagcgcaatggcgttttgctgcgctttttcatgagagatttttttactgcgcgcttcgtcttctaccgcgcgggcgatcgctttcgaggccagcagtttgttaaacagatcctgacgggcaggcaggcgtgggccaaccgccgccaggcgctggcgagcaaagtgcatacgcgccacgcgagccagcttctgcgcgatgattttatcggtgccgtgttcatcagccatacgacgcaatgagacggacggcgagaatcggacaaagctatcgcgacccagccaggagatggcaaagaatttctgtacgccgttcagcatacgtaaaggcgggttatcttctcccttttcacgacccggcgcgcggccaaacatcacggaaacgggcaccatctgcacgtccaaagccggattactccgatgcagatcgagataatcgtgaaaaagtttcaccgactcttcttttggcgtgtaataggtaaagacacgcggtccgccgtgaataaatacatagcgtggcaacagcgcgccgtcgatctccagcggctccagcggatccgggagatcgtgcgccagacattgcgcccgcagcgtcagtaagtccgcttttgagttgtatggcaagacatacataatggggcgagaagtatcgagccccaattcctgggcgggttccgccggaatagacttgctttttaccagtatgcttaatggtaaattcagtaatttgtagtaaattcgtggccagccggacataaacgatgtaaagcctctggttaataatgcaaatgcggtgcaaggatatcagaaagtttagcgaatttctgttgtatcccgtcatacttcgcgctgcgttacggcagtccgaatcgtgcagggcaaccgtataatgtcattgacgttaataatgtaaaaaggttcttttgatggccaataataccactggattcaccagaattatcaaagcggcaggatattcctggaaaggatttcgcgccgcatggactcacgaagcggcgtttcgccaggaaagcctcgcggtattgctgggcgtcatcatcgcctgctggctggatgtggatgcgattacccgtgtgttattgataggttccgttttacttatcatgattgttgaaatcctcaacagcgctattgaagcggtcgtggaccgcatcggttctgaataccatgagctttccggccgtgcgaaagatatgggatcggctgcggtgctactgtctattttcgttgccctgatgacctggggcatcctgttatggtcacattttcgataaaggttccaaattttataaatctcttgttttttgcgccgtttgtggttccaaaatcacctttaactgtatatactcacagcatgattgtatatacacccagggggcggaatgaaagcgttaacggccaggcaacaagaggtgtttgatctcatccgggatcacatcagccagacaggtatgccaccgacgcgtgcggaaatcgcgcagcgtttggggttccgttccccaaacgcggcggaagaacaccttaaagcgctggcgcgcaaaggggtgcttgaaatcgtttccggcgcatcgcgaggtatccgtctgttacaggaagaagaggacggattaccgcttgtcgggcgtgtcgcggcgggtgaaccgcttctggcgcagcagcatattgaaggccattaccaggtcgatccttcgctgttcaaacccagcgccgatttcctgctgcgcgtgagcggtatgtcgatgaaagacatcggtattatggatggggatttgctggcggtacataaaacgcaggacgtccgtaatggccaggtggttgtcgctcgcattgatgatgaagtgacagtaaaacgcctgaaaaagcagggcaataaagtggagctgctgccggaaaacagcgagtttacaccgatagtggtggatctgcgcgaacaaagctttacgattgaagggctggcggtaggcgtcattcgcaacggggaatggttgtagtctctttttaatctccttgtaagccgccatccggcaatcgtgtagcctgatggcgctgcgcttatcaggcctacgggaatgcagttcctgagatgattaatttgtaggccggataaggcgttacgtcgccatccggcaatgcgctcgtttcgtttaactccttgtcaggcttttctccatgccgctttttacctcctctgataaagctctctggcgtcttgcgttgccgatgattttttctaacatcaccgtccccttactggggctggtcgatacggcggtgattggtcatctggacagccctgttttcctgggcggcgtggcggtgggcgcgactgccaccagctttcttttcatgctgctgctatttctacgtatgagcaccaccggcctaacggcgcaggcatttggcgccaaaaatccgcaggcgttagcccgggcgctcattcaaccgttattgctggcgctgggcgcaggcgtgatgattgtgctatttcgcacgccgcttatcgagctggctttacatattgtcggcgggaacgacgctgtcctggtgcaggcgagacgcttccttgaaattcgttggctaagcgctcccgcgtcactggcgaatctggtgctgctcggttggctgttaggcgttcagtatgcgcgggcgccggttatcttgttggtcgtgggcaatatcctcaatatcgcgctcgacctgtggctggtgatggggcttcatatgaacgtgcagggtgctgccctggcgacggtcatcgcagaatatgtcacgttactgatcggcctcatgatggtacgtaaagttctccatctccgcggtgtgtcgctggatatgctaaaacaggcctggcgcggcaacgtgcgccgccttttggcgctcaatcgcgatatcatgctgcgctcattgctccttcagctttgttttggcgcaatcacggtgtcaggcgcgcggctgggcagcgatattatcgcggtaaatgcagtcctgatgaccttactcacctttacggcctatgcgctggacggttttgcttatgcggtggaggcgcactccggtcaggcttacggcgcgcgtgacggtagcaagctactggacgtctggcgagcggcgtgtcgtcagtcaggaattgtggccttgttgttttccacagtctatgccctggcaggcgaacatattgtcgcgttactgacctcattgccgcaaatacagctactggcggatcggtatcttatctggcaggtggtattaccgctggtgggcgtatggtgctatctgctcgacggtatgtttattggcgcgacgcgcgctgccgaaatgcgcaatagcatggcagtcgccgcgggaggattcgcgctgacgctcttcgccctgccggtattaggaaatcatggtttatggctggcattaaccgtgttcctggcgcttcgcggtctgtcgttgagccttatctggcgtcgtcactggcgcgagggtacatggtttgccagatcgtgacggttaaaaattctgaatataaaaccgaaggccgaattcctgcctacaattattatcacgtccagcagaaattgcagagcatttgggcgaataacacctgctattcctaaccgaatgatgaggacaagatgatgaataaagacgaagccggcggtaactggaaacagtttaaaggtaaaatgaaagaacaatggggcaaactgaccgatgacgatatgaccgttatcgaaggtaaacgcgaccaactggtaggtaaaatccaggagcgttacggttaccagaaagatcaggcggaaaaagaggttgttgactgggaaacccgtaacaactatcgctggtaatatgttttcccctaccaggagtacatggatgtgcttccccctgtttgcttatgaatgcgggcgtgcccctctctactgccgcccgttttccgttcaggctaacgtggttttttcttcaccagcaccgagtgatcgtgaccacagtttcccggatggcgacacgcttctacttctacgcacgcagggcacagaccgtgcgcctcaataacgttatgtcgtagcgcaaagcccattttagccgccagcgtatgcatgatgtcttccacgccctcggcacactcttccttcaccacgccgcaacgatcgcagataaacatggccgagctgtgcgtcggctggtcgaacaggtggcaaaccacataactattggtggattccactttatggacaaaaccctgttcgagcaaaaaatccagcgcgcggtaaatggtgggcggtttggcctgtggttccgtttcgcgcagcaaatcgagcaaatcgtatgcgctgatggcaccctgttgcagactcatcaggcgcagcacttcgaggcgctgaggcgtcaggcgcacgttgcgctgcgcgcagagtttttcagcttgcgccagtaactcttgcgttgtggtcttttccatgtagcacctcgaatggcatgaaagtctaatccgttactttaccacgagctgcttaaaactctgaaattaccccgcgacaatatatcgcctgctaagcttttccgcgccagtattctcatctatacataatgagggtcgatattataacaacaggatttaacatcactatttcacagcaatagttcgcctctgtccggtaaagcgtggcggaggaattacttcacctgataataagatgggctaactgtgaacaaaaacgtcaaactttcactgattgctatcgcggtctcgctttttatggcaaagcaggcgagcgccgccaatacctggacggaagcgcgtaatgacgcaatgggcgggacgggcgttgcgtccgcgaattatggcagcggagtactattaaatccggcgttactggcaaaagccaaaccggaagacaatatcactgttgtccttcctgcggtcggcgtccagattacggataaagacaatctccaggatgaaattgacgatatcagcgataaagtggattactacgatgaggtcgtcgataaccttacgctggggcaaattctgctcaatccgcgaggcgtgctgaatcaatttcagggcgccgcgcgcgacctggccgatgagctggaatatctcaacggaaaaaccgcccgcgccaatgccggcgccgggttggcggtaagtattccagggcaaacgctttccgtggcgtttatcgccaaaggttatgcgcatgggcgcgtgagttcgtccattgatcagaacgatattcagtatctgcgcgatatccagcatgatgaacgtgtcgcgcttcgtgaagcaggacgcgctgctttgctggggtctgacgaaattacaaagcatttaaactctaccgcgtcggggcgggtagcgattgtatctgactacggtattgcgctggcgaagcagtttgtggtgggcgaggtgcctgtttccattggcgttacgccaaaactgcaaaaaacctggctctataactacaccacctcaatttataactacgacagtagcgactggaatagcagccgttatcgcaatgacgatacgggttttaacattgatgcggggcttgctgccgatatcggtgaaaactggacgctgggggtgagcggacaaaatctggtatctcgcgatatcgatacgaaagatatttacatcactaatggtatgacgggagaaaccaccaactacaaagatacataccaaatccgccccctggttaccgcgggcatcgcatggcataacgatttgctgaccgtaagcgccgatggcgatctgacggaaacgaaaggctttaagagcgaagacaattcacagtacgttggcgtcggcgctgaagttcgaccgttgtcatggctggcggtgcgcgcagggtatcgtgcggatgtgaaaaataacgatagcaatgtggttaccggcggtcttggctttgcgccctttaaccgtgtgcatctcgatttaatgggactgtacggcgaagatgaaacctggggggcaggcgcgcagcttacaatgacattctgaggtgctttcaccggaggcgctacgcctccggtttagcgttatgctatagtaacgccccttttttaaccggatgcttatttattcgccatgcagcctgaaacccagtcctccgctttacctgcttatcgcttctccatcgcgcctatgctcgactggacggacagacattgccgctatttcctgcgtttgctgtctcgccagacgcagctctacaccgaaatggtgaccacgggcgcgattattcacggtaagggtgactatctggcttatagcgaagaagagcatccggtcgctctacagcttggtggaagcgatccggctcagcttgcgcattgtgcaaagctggcggaagcgcgtggctacgatgaaattaacctcaacgtggggtgcccttccgatcgcgtgcaaaacggtatgtttggcgcctgtttgatgggcaatgcgcaactggtcgccgattgtgttaaagccatgcgtgatgtcgtctcgattccggtgacggtaaaaacccgcattggtattgacgatcaggacagctatgcgtttctgtgtgatttcatcgatacggtttccggtcagggcgaatgcgagatgtttattatccatgcgcgcaaagcctggctttctggcttaagcccgaaagaaaatcgtgagatcccgccgctggattacccgcgcgtctatcagctaaagcgggattttccgcacctgaccatgtccattaacggcggcatcaaatcgctggaagaggcgaaggagcacctgcgccatatggatggcgtcatggttggccgcgaagcttatcagaatccgggtatactggccgcggtggatcgggagatttttggcgccgataccaccgatgccgacccggttgcggtggttcgcgcgatgtatccctatattgagcgtgaattgagccagggagcgtatctggggcatatcactcgccatatgctggggttgttccagggcatccccggcgcgcggcagtggcgtcgctatctgagcgaaaacgcccataaagctggcgcggatgttgctgtactggagcaggcgctaaaactggtggcagacaagcgttaaaagttcgccaaaaattagtcaatctcaccacgccctgtgcagtcttgcagggcgtttttcttatatatcaataatataaatattggcatgatttttgtaagggcttacctgaccagacccggtaagcgccgtgccgccgggcaatgccatttttatggggagcgactatgctggaactactttttgtgcttggcttttttctgatgttaatggtgacgggcgtctccttgctgggcattctggccgctctggttgtagcgactgccgtcatgttcctgggcggaatgttcgccctgatgatcaagctgttaccgtggctactgctggcggtggctgtggtgtgggtgatcaaagcagtaaaaacgccaaaaatcccacagtatcagcgcaataaccgtcggttttactaaggtattgagcggttcgtcacaacctggaactttgccctcacaagcaaataggaatcgattattaaatctgtcatgattgcgcaggtaacgaattcatcgcgctgtaccctacatacagccgaacaaaaaaagaaagggcttcccgggtggaagcccaatttctttgcagagctattacggaatcagcaggcttgagccctgtgtggcccggctttccagcacttcatgcgcgcgacgggcatcttttaacgcatagcgttgattttcagccacatcgactttaatcacgccgctggcgatcaatgagaacaattcattgctggcttcggtcagttcttcacgtgtcgtaatatacccctgtagtgaaggtcgcgtggcatacagggaacctttctgattcagaatacctaaattcacgccggtgacggggccggacgcattgccgaaactgaccatcagtccccgacgttgcaggcagtccagtgaggcctcccaggtatctttccccacggagtcatagaccacgcggacttttttgccgccggtgatctcttttacccgttcgacaatgctctcctcacggtaattaattacctgccaggcaccggcgtccagcgcccgctgcgctttttgcgcgctaccgacggtaccgataagcttcgcgcccagcgcttttgcccattggcaggcgatcagaccgacgccgcccgcagcggcatgaaacaggaagggttcgtcgggtttcacttcataggttttgcgcaacaggtaaaaaacggtcaatcccttgagaaaagaggctgccgcctgttcgaaagaaatggcgtcaggcaaaatcgcggctttatctgcggtgacgttatggacggaactgtaagcgccgagcgttgactgcgcgtagacgacgcgatcgccgacgcgaatgtgctccacgccgttgccgactttactgaccacacccgcagcttcggttcccaggcccgcaggcaacgacgggggcggatagagtccgctacggatataggtgtcgatgaagttgataccaatggctttgttctcaacctggatttcgtgttccgccggttccgctggcgtaaactccacggtctgaagcacttccggaccaccatgcttgtgaaattcaatacgcgttgccatgcttcctccaaaagaaatgtggtaatctttcgacccaatcactatctcggtaactccattcactatggcaggaaataaacccttcaacaaaccacagactgatgcccgcgaccgcgatccgcaggttgccgggataaaagtgccgccgcactcgattgaagcggaacagtcggtgttgggcggtttaatgctggataacgagcgctgggacgatgtggccgagcgcgtggtggcggaagatttctatacccgcccgcatcgccatatctttacggagatggggcgcttgcaggaaagcggcagtcctatcgacctgattacgctcgcggaatcgctggagcggcagggccaactggacagcgtcggcggtttcgcctatctggcggagctgtctaaaaacacgccaagcgcggcgaatatcagtgcttatgcggacattgtgcgcgaacgcgccgtggtccgcgatatgatcgcggtggcgcatgaaattgcggacgccggttacgatccacaggggcgcaatagcgacgaactgctggatctggcggagtcgcgcgtcttccagatcgcggaaaaccgggccaacaaagacgaaggtccgaaaagcatcgaccagattctcgacgccaccgtggcgcgtattgagcagttgttccagcaaccgcacgatggcgttacaggcgtggataccggctatcaggatctcaataaaaagacggcagggttacagcgttcggatttgattatcgtcgcggcgcgtccctccatgggtaaaaccacttttgcgatgaacctctgcgaaaatgcggcgatgttgcaagataagccggtactgatctttagtctggagatgcccggcgaacagatcatgatgcgtatgctggcctcgctgtcccgcgtcgatcagacacgtattcgtaccggtcaacttgatgatgaagactgggcgcgaatctccggcacgatgggcattctgctggagaaacgcaatatgtatattgacgactcctcaggtcttacgccgacagaagtccgttcgcgcgcgcggcgtattttccgcgaacatggcgggttaagtctgattatgatcgactacctgcaattgatgcgtgtgccgtcgctttctgataaccgtactctggaaatcgccgaaatttctcgctcgttgaaagcgctggcgaaggaactccaggtgccggtcgtggcgctatcgcagcttaaccgctccctggaacaacgcgcggataaacgtccggtgaactccgacctgcgtgaatccggctctattgaacaggatgccgacttaattatgtttatctaccgtgatgaggtttatcacgagaacagcgacttaaaaggcattgctgaaattattattggtaagcaacgtaacggtcctatcggtacggttcgtctgacgttcaatggtcagtggtcgcgcttcgataactatgcgggaccgcaatacgatgatgagtaactctccgtcattcttttaacaaggaattcaaatgcaagcggcaacagtcgtcattaaccgccgcgctctgcgacacaacctgcaacgtctgcgtgaactggcgcctgccagtaagctggttgcggtggtgaaagcgaacgcttatggacacggtcttctggagaccgcgcgaacgctccctgatgctgacgcttttggcgtggcgcgtcttgaagaggctctacgtctgcgagcgggcgggatcacgcagccaatcctgctgctggagggttttttcgacgccgccgatttgccgaccatttccgcgcaatgtctgcataccgccgtacataatcaagagcagcttgccgccctggaggcggtggagctggcggagccggtaacggtctggatgaagctggataccggtatgcatcgtctcggcgtgcgtcccgaagaggcggaggcgttctaccagcgtctgacgcactgtaaaaatgtacgccagccggtgaatatcgtcagccattttgcccgtgcggatgagccggaatgcggcgctaccgaacatcagctcgacatttttaatgccttctgtcagggtaaacccggtcagcgctctattgccgcgtctggcggtatcctgctgtggccgcagtctcactttgactgggcgcgtccgggcatcattttgtatggcgtatcgccgctggagcacaaaccctgggggccggattttggttttcagccggtgatgtccttaacctccagtttgatcgcggtgcgtgaccacaaagcgggcgaaccggtgggctacggcgggacatgggtgagtgagcgcgacacgcgcctgggcgtggtggcgatgggttatggcgatggctacccacgagcggcgccttccggtacgccagtactggtcaatggtcgtgaagttccgattgtcgggcgggtggcgatggatatgatttgcgtagatttggggccaaacgcgcaggataacgcgggcgatccggtggtcttatggggtgaaggtctgccggttgaacgtatcgctgaaatgacaaaagtaagtgcttacgaacttatcacgcgcctgacctcaagggtggcgatgaagtatattgattaaatacgcggcgggccgggtggcgcttgcgcttatccggcttgtatcgcgcattggctgtaggccggataagacgttcacgccgtcatccggtaatatgcgcatccaccacaacatcctctcgatcttctcgtccttccggtttattgtgttatttcctgccctctgtaaacctggagaaccatcgcgtgtttcaaaaagttgacgcctatgccggcgatccgattctttcactgatggagcgttttaaagacgactcccgtcacgacaaagtgaatctgagcattggcctgtattacaacgaagacgggattatcccacagcttaaaacggtggccgaagccgaagcccggcttaacgcgcagccgcatggcgcttcgctgtacctgccgatggaaggactcaatacttatcgccatactatcgcgcctttgctctttggcgccgatcacccggttcttcagcaacagcgcgtggccactatccagacattaggcggctccggcgcgctgaaagtaggcgcggatttcctgaagcgttatttccccgacgcaggcgtatgggtgagcgaccccacctgggaaaaccatattgcgatatttgccggggcaggattcgaagtgagtacttacccctggtatgacgacgcgactaacggcatccgttttaacgatctgctggccacgctgaatacgttacctgcgcgcagtatcgtgttgctgcacccctgttgtcacaacccgaccggggcggatttaacgccttcgcaatgggatgcggtgattgaaatagtgaaagcgcgcgatctgattccgtttcttgatattgcctatcaggggtttggcgcaggcatggacgatgatgcgtacgttattcgcgccattgccagcgctgggttacctgcgttagtcagtaattctttttcgaagattttctcgctgtacggcgagcgcgtcggcggcctgtccgtggtgtgtgaagatgctgaaatcgccgcgcgggttctgggacagctaaaagcgacggtgcgccgaatttactccagtccgccgtgtttcggcgctcaggtggtcgctacggtcctgggcgatgaggcgttaaaagcgggctggctggcggaagtcgacgcgatgcgtaaccgcattatatcgatgcgccagacgctggtgaaggagctgaaggcggagatgcctgaccgcaactttgattacttgttacagcagcgcggtatgttcagctataccgggttaagcgaggagcaggtcgatcggttgcgcgatgagtttggcgtttacctgattgccagtggccgcatgtgtgtcgccgggcttaatgcttcaaatgtacaccgcgtggcgaaggcatttgccgctgtcatgtaatattcaggccggacggcgataacagtgccctccggcctgacaatagctgttgtgatcatcctcttttttcgtaacaaaaccgcagataatccttccttttgaccgttactggcgttatggtcagatagttttttgagcaaagactcatcttaataattataatattttgaattttaagggaaaaccatgaaaaaaataaccctggcgctgagtgccgtctgtttgttgtttacgctaaaccattccgcgaatgcgttagtatcttccccttcgacgctcaatccgggcactaatgttgcaaaactcgcggaacaagcgcctgtccattgggtctctgtcgcccagattgaaaacagcctcaccggacgcccgccgatggcggtcggctttgatattgacgacaccgtgttattttccagccccggattctggcgcggaaagaaaacctactccccggacagcgacgattatctgaaaaatccggccttttgggaaaaaatgaacaacggctgggatgagttcagtattccaaaagaagtggcccgacagctcattgatatgcatgttcgccgtggcgacagtatttactttgtcactggtcgtagtcagacgaaaacggaaaccgtgtcgaaaacgctggcggataacttccatattccggcggcgaatatgaatccggtgattttcgccggcgataaaccggaacaaaatacgaaagtacagtggctgcaggagaagaacatgcgtatcttctacggcgattcggataacgatattaccgcggcccgtgattgtggtatccgcggtattcgcatcctgcgcgcggctaactccacctacaaaccgctgccgcaggcaggagcgtttggcgaggaagtcattgtcaactcggagtactaaaaatcaggagagcgacaggctctccttttttgcatgatttttgcacaaacttgccccgctggcttttaccttttccagacttgctgcacactattcaggagacgtttgtttttaggaaggagcagcctatgtggtatcagcgcaccattacactgagcgagaagccgcgcgggtttcatctgataacagatgaaattaccgataaattgtctggcttaccgcctgtcgaaacgggtttgctgcatctgttgttgctacatacctcggcctcgctgacgttaaacgaaaactgcgatcccaccgtgcgcgctgatatggagcgccatttcctgaaaaccgttcccgataatgcggcgtatgaacatgattacgaaggcgcggatgacatgccttcgcatattaagtcgtcagtattgggcgtctcgttgctgctgcctgtacgccaggggcgtttacagttaggaacatggcaaggtatctggttgggagagcaccgtattcacggcggtccacgtaaaatcatcgcgacactacaaggggaatgataatgaccatttcggaattactgcaatactgcatggcaaaacctggcgcagagcagagcgtccacagcgactggaaagcgacgcaaattaaagtggaagatgtacttttcgcgatggtaaaagaagttgaaggacgcccggcagcctctctcaaaaccagcccggaactggcagagttgttacgtcagcagcacagcgatgtacgaccgagtcggcaccttaataaagcgcactggagcacggtctatctggacggctcgctgccggattcacaactctattatctggtcgatgcctcttatcaacaggcggtaaatgcgctgtcggaagataaacgcaagcagttgccgcagtcctgattatagcgcgccgaccaacaacgccagggcgatatcaatgaggcggatgaccgtagaccggatacggctgccgagggcgatttgcgcattattggcgcgtagcctggcgaggtcccgctgtccttccagcagaataatcatatcgtcgtcgtccagccagccgcgagcatgttcctgaagcgcgcgggcgataaacgcggcggactcgcggatagcgtcgtcgctgtcttctcttgcctgcttatacgtctggataaactcggcaatcgccgaggacgctacagggtgttcggcctgggcggtggttatcaggtaatgtatttcgttaatagacgccattttcatctccctgagtgcagcgggcgccccaatgcagacactcgccctgtatggctaatttccagacctgattattttgctgttggtatctctcagcctggatgtaagtaagtggttgcttacgtcgcataacccgcgcataaagacgcaaatagtgatttttcagcagcgccagattatcgagacggtgtttatccccaccttgacgggcgacccgctcagcctgaaaaaatatctggcggatatcgcggtcatccttgagcagtgtctctttttgccacggtattcgcgccgcgtcctgcaggaagcgggttgagcgcgcttgtaatagcgttagttgttgaaaagccacggcgctaaagcggtcaggcagcgtacaggcggataaaaacaggcacagcagtagtgtgattgcgtagggcaacttcatggtgttttccataacagaccgtttgcgctatcacatgtcagagcgaggcggcacgcaaatcacaaatgctcaacacggatacaatgaggtgggatgaggaaaaatgatgccgcttcccggcgaatcggaaagcggcgtgaaggttatttgagcataggtttaaggaagcgggcggtatgcgacgcctcgcactccgccacggtttccggcgtaccggcgacgagaatttcgccgccgccgctgccgccttccgggccgaggtcgacaatccagtccgccgttttaatgacgtccaggttgtgttcgatcaccacgatggtgttgccctgatcgcgcaactgatgcagaacgtcaagcaactgctgaatatcggcaaagtgcaggccggtggttggctcgtcgagaatatacagcgtctgcccggtgccgcgcttcgacagttcgcgcgccagcttcacgcgctgggcctcgccgccggaaagcgttgtcgccgactgaccaagacggatataggtcagccctacgtccatcagcgtctgcagcttacgcgccagcgccggaaccgcatcaaagaactcacgcgcttcttcaatggtcatatccagcacttcgtggatggtcttgcctttgtacttaatctccagcgtttcccggttatagcgcttgcctttgcactggtcgcacggcacgtaaatatccggcagaaagtgcatttcgactttaatgacgccatcgccctggcacgcttcgcagcgaccgccgcgcacgttgaagctgaatcgccctggcgtgtagccgcgcgagcgagactccggcacgccagcaaaaagctcgcgaaccggggtaaagacgcccgtataggtcgccgggttggaacgcggggtgcgcccgattgggctctggtcgatatcgatcactttatcgaaatgttccagcccctgaatatcccgatacggcgccggttcggcgatagtcgccccgtttaactgacgctgggcgatggggaacagcgtgtcgttaatcagcgtcgatttaccggaacccgagacgccggtgatacaggtaaacagccctaccggtagcgtaagggtcacatctttcaggttgttgccgcgcgcgccggtgagtttgagcactttttctggatttgccggcacgcgttgtttcggcacttcaattttgcgtttaccgctcatgtactggccggtcagcgattccggtaccgccataatggcttccagcgggccttccgccaccacctcgccgccgtgaacgcccgcgccggggccaatatcaatcacatggtcggcggcgcgaatggcgtcttcatcgtgttccaccacaatcacggtattgccaagattgcgcagatgaatcagcgtacccagcagccgttcgttatcgcgctggtgcagaccgatggacggctcatccagcacatacatcacgccgactaacccggcgcctatctggctcgccagacgaatacgctgggcttcgccgccggaaagcgtctctgccgagcgggagagcgtgagatagttcaggccgacgttcaccagaaacttgaggcgatcgccgatctcttttagcactttttcggcgattttcgctcgttgcccggaaagcttgagattagtgaaaaaatccatcgcatggccaatgctcatatcagaaatagcaggcagcggcgtattttccacaaatacatggcgcgcttcgcgattcagtcgcgtgccttcacagctggcgcaggggcgattactgatgaacttcgccagctcttcgcgcaccgcgctggattccgtctctttataacggcgctccatattatgcagcacgccttcgaacggatggcggcgcacggaggtatcgccgcgatcgttcatatatttaaattcaatgttctctttgccggaaccgtacagcacgactttatgtacgttggcgctgaggcttgcccacggcgcatctacgtcgaacttatagtgttccgccagcgacttgagcatttgaaagtagtaaaaattgcgacgatcccaaccacgaatcgcgccgcctgccagcgacaggtcgggattctggatcacgcggtccggatcgaaatattgctgaacgccgaggccgtcacaggtcgggcaggcgcctgccgggttgttgaacgagaacagacgcggttccagctcgcgcatactgtagccgcaaatcggacaggcaaaattggcggagaacagaagctcctccgctttctcatcgtccatatcggcaacaaccgccgtgccgccggataattccagcgccgtttcgaacgactccgccaggcgttgggaaagatcgttgcgaactttgaagcgatcgatcaccacctcaatggtatgtttcttttgtagctccagcttcggcggatcggagagatcgcagacttcgccgtcaatacgggcgcgaatgtaaccctggcttgccagattttccagcgttttggtgtgttcgcctttacgctctttaataatcggcgcgagcagcatcagacgtttgccttccggctgtgacagcacgttatcgaccatctggctaacggtttgcgccgccagcggcacgtcatgatccggacaacgcggctcgcccacgcgggcaaacagcaggcgcaggtagtcgtggatctcggtaatagtacccaccgtagagcgcgggttgtgcgatgtcgatttctgttcaattgagatcgcgggcgatagcccctcaatatggtcgacatccggtttttccatgagcgacaaaaactgccgcgcgtaagcggagagcgattcaacgtaacgacgctgcccttcggcatacagagtgtcgaaagccagtgaggatttgcctgaacccgaaagcccggtcacgacaatcagtttgtcgcgggggatgacgaggttaatatttttgagattatgggtgcgggcgccccgaacttcgatcttatccattcacctttcccggtagagactcggatgcctggtttgtttgaaggacaaacggcagaaacggctaattatgacacaatttaacctgtttgaatatacagtattggaatgcatcttcagctaaagtatgcaacaatatgaggttcgcgcgagtgacctggaacctgcatcgcagctattaaaatgctacgtggaaatggtacactcacgcgtttacactatttatgaaacgtattcaggagactcaattatggccagcagaggcgtaaacaaggtgattctcgttggtaatctgggccaggacccggaagtacgctatatgccgagtggcggcgctgtcgccaacttaacgctggctacttctgaatcctggcgcgataagcagaccggcgaaatgaaagagcagactgaatggcaccgggtggtgatgttcggcaaactggcggaagtggccggcgaatatctgcgtaaaggttctcaggtgtatatcgaaggtcaattgcgtacccgcaagtggaccgatcagagtggccaggaacgctatacgactgaaattaacgttccgcagatcggcggcgtgatgcagatgctgggtggtcgccagggcggcggcgcaccggcaggcggtcagcagcaggggggttggggtcagccgcaacaacctcagcagccgcagggcggcaaccagttcagcggcggcgcgcagtcgcgtccacagcaatccgcgccagcgccgtctaacgaaccgccaatggattttgacgacgacattccgttctgatttttggtaaaaaactcaaagcgttatttgcattttcgctatagttctcgtctgctgaaatgcctggtgtaaaccaggcattttcttacctggtattattgtctttgtatccctttcaaaaaagagaagcgcatatcttacggaaaaatgtcgcttatcgcctctggccgactcgcctcggcacatcattatccagccgaagttcataaatgtactgcaataacccggattgtcttaaatatgaaagagaaatctcatctgcaaaatatataatttatagccattttttgacaacaaaaagatattataaaataacggtagagaatggtcggtattatcaatggttaattaaatgtttgctttagcttgtgatgagctcaaatatgatatgtgtatcttgctttatttttaattgctgaagataaaattgttacttatagctggctttatataaaaaatggttttatttgtgtatttttttacacaattctgattttttactccccacttattatattttcaatgatttaagttatattgaagtccatatgaccctatgttttaattgtgaaaattaattttatcctctggaggcaaatttattaaatacgtatggttataacgcgtattaaaaagaaatatgtccttaaaatgatttagagtttcaatgattagctaacaaatctatttatcggcgggtggttttaatttgctgatgactattttttatttatgagttgagagcttatgcgatacctattattggggaggatatagttagtgcaataattgatgtctacctaattaaaaaaatgaagagtgtttttaattaaagcactcatctttgttgtgggcgcataaaaatggcgtcgttgtttttatttttctgattacgagatgtaagaaaactgaaatctataaagcgtattggtagcaggaagccaagggcggtagcgttcactttctgaataagttgagcatcctttatcctttctaatccacaaaaacattttattcacaatgtaatatcaggagacaacatggaagacgaaagtaatccgtggcctagttttgttgatacattctctacggtattgtgcatttttatatttcttatgttggtgtttgcacttaataatatgattattatgtatgacaactcaattaaagtttataaagcaaatatagagaataagactaaatctactgctcaaaatagcggagccaatgacgattcaaatcctaatgaaatagttaataaggaagtgaatactcaagatgtgtcggacggaatgactacaatgtcaggtaaggaggttggagtatacgatatcgccgatggtcagaaaactgatataacgtctacaaaaaatgagcttgttattacgtatcatggcaggctgagaagcttttcagaagaggacacttataaaataaaggcttggttagaagacaaaatcaatagtaatttattgatagaaatggttattcctcaggcagacatctctttctctgactctctacgactgggatatgaacggggaattattttgatgaaagagattaagaaaatatatcctgatgtagttattgacatgagtgttaactccgcagcatcaagtacaacgagtaaagctattatcacgactattaataaaaaggtgtcagagtgaaatatataaatcattaccgctatttgtttgtctgttttttccttgccatactccctttttttgctttatcttttcccggtataagagagtatgtttttgataacttcatggtttctgcaatttacaatggagtcattattgccatttatattacaggttctttgtgtgcattattcactattcttaaaaatatttcagcaaaagacatattaatagctcaggacgccagtagaaaaaatagcattctttctaacctcaatcaggttttgtttgccggggagtccaaacagtgtgatttcaatttactgatggaattagatgacaatgtgtctaccgcccgtaatcaacgattgtcatttattatgagctgtagcaatgtgtcgacgcttgttggcctgttggggacgtttgcgggtctgtctattacgattggttcaatcgggaacttattgagctcgccatcagatgttggcggtgataatgcaagtaatacactcaatatgatcgtgacaatggtagcgtcgctttctgaaccattgaaagggatgaataccgcatttgtatcttctatctatggtgttgtttgcgccatactcctgacctcacaaagtgtttttgttcgcagctcctattcccttgtttctacggaaatcaaaaaattaaaaatcataagcaacagagccaataataaacagcgaagcctgcgggttgaatcagagacgcttgtagaatttaaagagttgtttaaagcgttttttgataactacctgacagttgaaaacttacggacgcaggatgaagaaaagaaacgagagatgctatcagatagctttgtcactttgcaaaaccgactattggataactcagcaaaactggaacaaatttctacgctgattgatggttatctggtaagcagtaacgaaaatctcaaaaaattatctgacggtgtaataacaattacctctcgtttatctgaaggtaatatcctgcttgctgataataatgcacgactggaggcaatgagtacaatacaaaatattatagataaaaagaatgattcaataatgacatcagttgataaatgttatcaggaatctctttcacatggtaagaccataaacgatattgccgctggcagtgccgatatttctcatactctcgatgggctgagaaaagaaatggatgaggatatgaataatgttcatttagcgctatccgatctatcggctactgataaaaagattattgccaatactaaagagattagtgctgaaatggttagctaccgtgatacctatatgccattaatggaaaaaataacatctatgcatcaggaaatagtaaagcaacgtttgttaaacaaggaggaaaaaaatgaagattaagatgttttttctgacgactgcttttattacacaaagcacatacgccagcgagcttccggtcattcctctaagagatttagttaatgccgcattaacgcatcagccctctgttgctgtttcatattatgagactgaaaagaaaaacagtgacttagatctttcacgggcagcactttatcctaccctggatctaacatctggccttaataataacaggaaagagtcatcaggtaccgagaggaacgttgaaaataaggtgtctttatcataccgaataacggattttggagtgaggggggctaatatcaggaaatctgaatatgaaagagataatagtaaaactgactatgaaaaaacaaagaatatagtgtctcaggaggttgtgacaacctattacaacatcagtaaatatcgtgaaatgattgatggcgtaaatctggagaaagagttttataaaaagatgctggaaactttttcgttgctggtatcttccggtgtagctatgcaatctgatatgcgtaaagtacaagtatctatcgatgcattaaataccagaagcattatgtatcagtcgatgttggatgatgaaatgtataaaatgcagaatatgactggtctgaatttatcgccagttcagattcaaagcgatgaaaaattcaacctcttcaaaaaatatatctttgtcgaaagccctgaaaaacttatggacatggtgatgaaatacaacgatgactataagatgcttgtcaatacccgaaaagccgcgaccgaagatattaatgccgcaaaatcatcctattttccgactgtagatcttgtttccagctatgtacagaataacccgagcggtagtgccaaaaaaagtgattatgaagatgaatttaaaacgggtatcaatgtcagtttcaacatttttaatgggttcagaaattcagcccaggaaagaaaaatggtggcaagttactcgcaggctaagctgcaaattgacgattttttgattaaaacgcgttataacattgattcacaactttcaagatacgccgctgcaaaagagacttactcagtggcggaacgttcacatacaaacgcgttacagcttactgaattatatgagcaggagtttcagttagggcaaaaaagtttgcttgatttaatttcaagccgtaatgaagcatttcaggcatatgtaagcatgatcgacagcaaatatagcctgtatattttaaagctacagcaactctcattgatttttcatttaatggattatttaaaaggaaatactgaaagtgagttaaatgtaatgaaatgaatagaagacaaagcgatcatctcatgatgataattatttctttgacgatcttaattattatccttacctactttatagaaattaattcagtggttcatggtcagggcgttatcactactaaagataatgctcagttaatatctctttctaaaggagggacgatacaagatatttatgtagccgagggtgatactgtaaaaaaaggagaactccttgcaaaggtcgttaaccttgatctgcaaaaagaatatcaaaggtatagaactcaaaaagggtatctggataaagatgttaacgaaatatctttcattcttgataaagaaaatgagagtgggttgattaccctggatggcacccgttctttaagcaataaagaggtaaaagcgaatattgaattagtgcatagtcagataagagctaaagagttaaaaaaaacctctcttgattctgagattagcggattacaagagaagctgagttcgaaagaaaaagaactcgcattgcttgccgaagaaataaatattctttccccactggtaaaaaaaggaattagcccatataccaattttcttaacaagaaacaggcgtatataaaagttaagtctgaaattaatgatattgaaagtagcatcactttaaaaaaagatgatattgagttggttgttaatgatattgaggcgcttaataatgaattgcgactatctttatctaaaataatatctaaaaatcttcaggaacttgaggttgttaactctacattaaaagtaatagagaagcagataaatgaggaggatatctattcaccggttgacggtgtaatttataaaatcaataaaagtgccactactcatggtggtgtgattcaggcggcggacttactttttgaaataaaaccaaaagtaaggactatgctggccgatgtgaaaatattacccaaataccgtgaccaaatatatgtagatgaagccgttaaactggatgtgcagtcaattatccaaccaaagataaaatcgtataatgcgactatcgataatattagccctgattcctatgaggaaaataccggaggaacaattcagcgttattataaagtaattattgcattcgatgttaatgaagatgatttacggtggttaaaaccaggtatgactgttgacgccagtgtaattaccggaaaacacagcattatggaatacctgttatctcccttgatgaaaggcgtggacaaagccttttcagaaccagttaatactaaacgattagatacaccttgagagtgaatataatattatgggaaataaaagcatacaaaagttttttgccgatcaaaattctgtaattgatttatcttctttgggtaatgccaaaggcgcaaaagtttctctttccgggccagacatgaacattaccacgccgcgtggttcagtgatcattgtcaatggcgctctttattcaagtatcaaaggcaataacctcgctgttaaatttaaagataagactattaccggcgctaaaattctgggcagcgtagatttaaaagatattcaactggagagaattgacagctcattggttgattctgctcaggtagaaaagaaaggtaatggcaaacgacgaaataagaaggaagaagaggaattaaaaaagcagcttgacgatgctgaaaacgcaaagaaagaagctgataaggcgaaggaagaagcagagaaagctaaggaggctgcagaaaaagcgctcaatgaagcgtttgaagtacagaactcgtcaaagcaaattgaagaaatgctgcagaactttttggctgacaatgtagcaaaagacaatctggctcagcaaagcgatgcttcccagcaaaatacacaggctaaagcaacgcaggcttctaaacagaacgatgctgaaaaagttcttcctcaacctattaataaaaataccagtactggcaaaagtaatagcagtaaaaatgaggaaaataagctcgatgccgagtctgttaaagagccgcttaaagtcacattagcgcttgcggccgagagtaacagcggtagcaaagatgatagtataactaattttaccaaacctcagtttgtaggtagcactgctcccaatgccacggttattattaaaattaatggtattgctgtcggtcaggctgtagcggatagtttgggtaacttcacctttacagcgcctgaaacattgactgatggaacatataatctggaggcagaggccaagactgctgatgggagcggtagcgccaaacttgtcattactatcgattccgttaccgataaaccaacatttgaactttcgcctgaaagtagtgtgtccggtcataagggcttaacgccgaccttgacgccttcaattgttggtacggcggaagagaatgctaaggttgacatttatgtagataataaactggttgccagcgttgatgtcgataaagatggaaactggagttatgaatttaaggataatgaattatctgagggcgaaaatagtataaaagtcgttgctgtagataaagcaggtaataaaaacgaaacgacggatagtatcataaccgacaccattgctccagaaaagccgacgattgagctggatgatagtagtgattccggcattaaaaatgacaacattacaaatagcaccctgccaacatttattggtgtggcggaacccggttctacagtctctatttatcttggacttaaacatcttggtgaggtcattgttgctaaagatgggacatggagctatacgcttactacgccgctcaaggatggcgaatacaatataacagcaacagctactgatattgccgggcatacctcagcgacggcaaatctgccttttactattgatacacgtatcagctatttcagcgctgagattgaaacgacgaatgatagcggtattgtcggagataacgttactaacaatactcgcccaacctttacaggtaaaactgagccaaatgctattatcagtgtcataaatagtgagactggcgaagaggttatttttaaagcgaatgacaagggcgaatggacgttcaatttcacttccgactcagtggaagggattaacaatcttacgttcactgttgaagatgtcgctggcaacaaaaaggatttttcctttagttacgttattgatactattgcccctgtacctccgacggtttctttggaggattatgttgttttgccgaatggtataattttatcagggaatgatttaccggctttagtcggtacggcagagccaaagtctaccatcttattgatgcgagatggtaaattatatgacagcattgaggttgactcaaacgggacctggaattatcagtttagtaataaatttcttcagggcgcctatgatattgaaatcatttctcaggatgccgccggcaataaatcctctactgttaaatattcttttactattcaaactgaagttgtacctccaaaagcggaactcgatgccagtgatgattccggtgcaaaaggcgactggattaccaataaacataatgctctgacattactgggaacagcggataggtttgctaccgtaaatatccttattgacggtaaaacgataggcgtgacgactgcggatgcagacggtaactggaattttgatatttccagaaatctgtctgacaatgtttataagattacggttgaatccatcgatcctttaggaagaacgtcatctgtagattatcagcttaccattgatagctttacgccgatccctactgttatgttgcatgatagcgctgactctggcgttaaaggcgatatgattactaaaattaatacaccgttgtttaccgggatggctgaagctaatgctaaggtttccatctatgttgacggtgtgttaagtggtgaggctattgctggcgatgatggtgtatggaattttcaatttaccacagcgttatccgatggctcgcatgacgtaacggtaaaggtagaagatattgccggtaatactgcctcctcatcagcgtataatttccaaatcgtaacgcaaacgcaaaaaccaacaatagagttggtcaacgatacgggggttgataatacagaccatattattaatgaaaagaatcctgcactgacaggaaccgctgcaccctattcaacggttaaactctatattgatggtgcactgatcgctgaggtcagaacaaataaagatggcagatgggagtataccctgaaagccgatcaaggtttggttgatggcgatcatagaataaccgcttcagttgaagatatcgctggcaacattgctcattcggatcctttcttaattagcgtcgatactgctatttcaataccgatagtttcattgagcccggattcagattcgggaatttcagatgataatttaacgaatatcgttaaacctaccttgcacctaaaagatattgatccggacattatcagtgttcaggtatgggatgccatgtctgatacgcagatcggtgttgccacgcaacaacctgatggttcatgggcctatacctttacttcagatttaacggaaggcttgcatcaggtttatgtcaaggttgaggacattgcgggtaataaagcgaacagcgcgatattcgattttactatcgataccacagtatcaacgccggtgatttccctgctttctaaggatgatacgggggttacaggcgataacctgaccaatatcaataagccaggttttgctatttccggtgttgatgccgatgcgcatcgggtcgtcgtacaggtgatgcacaatggcgtgagcgaagagatcgaactttcccacctcaatggtagttggttatttataccagggaatacgtgggcggatggcagctacacgttaacggtgaaagtagaagataaggcaggaaataccaactactcagcgccgctgacggtcgttatcgatacccaaatcgccattgatggggtggaactggtcaacgatagcggcgtgaaaggcgataatatgaccaacgacgaccgtccccactttcgtgtgacggtacctacggatgtcaatgaagtccgtctgagcattgacggtggtaattcgtgggttcaggcaactccgggcgtggcaggaagctgggagtatatctggccgacagacctggcagatggtcaatacacgctaacggtggaagcgactgataaagcaggcaatacagtgacgaagaccatcgatttcgcggtggataccacgctgtcagtgccggtcatcgtactggatagcgcggacgacaccggcatccagggcgataacatgacgaatagcacccagccgacatttgccctgcagcatattgatgatgatgccgttcgcgttacggtcagcgtggagcatggcggcgtcaccaccacatttgacgccacgaaaggcacaggcggatggacctttacgccgccgacatcatgggcggatggtgattataccctgagtgtgtcagtcgaagataaagcggggaacaccagccattctgcatcgctgacggtgacggtggacacgcaaatcgccattaataacattgaactggtcaatgacagcggtattcccgacgataatctgactaataatgtgcgtccgcacttccaggtgacggtaccgacggatgtcaacgtggtgcgcctgagcattgacggcggcaagacgtggttcaacgctacccagagcgcgacgccaggcgtctgggattatatctggccggatgatgtggccgacggaggctataccctgacggtagaagcgaccgatgaggcgggaaataaggcaacacagacgctcgatttcaccatcgataccactctgtctgtgccgaccctctcgctggacagcgcagatgacagcggcatcgcgggcgataatatcaccaatgttaaaacgccgggctttaccctcaacaatattgataccgatgtcagccgggtgatagtggaggtaatgcacaatggcattaaacaggaggtgccactggttcagaccggcggacagtggcgctttgcgccgaccagcgactgggcggacggcgactatatcctgacggtgaaggtagaagatagggccggaaatgtgaagcagtccgcgccgttgacggtgacagtagacacgcatatcgccattgaccgtattgaactggttaacgacagcggtatccccggcgataatctgaccaatgaagcgcgcccgcactttcaggtgacagtaccggcggatgttaacggtgtaagactgagtattgatggcggcaaaacgtggtttgacgccacgcagagcgcgacgtcgggcgtctgggattacacctggctgacgaatgtggctaacggccctcacaccctgatggtggaagcgtccgacaaggcgggaaacaaaacgacgcagaaactggacttcaccatcgataccattctgtcagaaccgacgattaccctggacagcgcggatgatagcgccgctggcgataacatcaccaacgttaagatgccaggctttaccctcggtaatatcgacgccgacgtgaccaaagtggtggtgacggtggcgcatgatggtaagaaccaacagatagagttgattaagaacggcggtgtgtggcgctttacgccgggcgcagcctggaccgatggcgactatacgttgacggtaaaggtagaagataaggcgggtaatacaaattattctgcgccgctgacggtgactatcgatacgcaaacgtctattgatcgcattgagcttcttaatgacacgggtattgtcggggataacctgaccaatgaagcacgtccacagtttcatattacggtaccgacggacgtgaactctgtgcaactgagtcttgatggcggcatcaactgggttaacgcaacgctgacgtctgacggcgtttgggagtatatatggccgacagatctggtcgaaaatacgtataccctgacagtgaaagcaaccgatgttgcaggcaacacggcgacggaaacgctcaattttatcattgataccacattgtcgacaccgaccatcacgctggatagcgcagatgatagcggcaccgccaacgataataagactaacgttaaaacgccgggttttattatcggcggtattgattctgacgtgactcaggtcgtcgtgcaggtgatgcgcgatggtcacagcgaggaggtggagctgacgcagactaacgggcagtggcgttttgtacccggcagcgcgtggactgatggcgactatacgctgacggtaacggtgaaagatgaggcgggtaatattcgccactcagcgccgttgacggtcaccatcgatacgcaaatcaccattgaccatattgaactggtcaatgacagcggtattcccgacgataatctaactaataatgtgcgtccgcacttccaggtgacggtaccgacggatgtcaacgtggtgcgcctgagcattgacggcggtaagacgtggttcaacgctacccagagcgcgacgccgggcgtctgggattatacctggctggctgatgtgggagagggtaagcataccctgacagtggaggcgaccgacaaggcgggaaacaaaacgacgcagcaactggacttcatcatcgataccctactgtcagaaccgactatcgtgctggacagcacggacgacagcggaacaaaaggcgatcacctgaccaacgtaaataagccgacgtttttactgggcaatattgacgcagacgcgcggtatgtcacggttgaggtacagcatggcggcacgaaagaggtgctgacggccaccaaagacgcgaccggcaactggagcgtgacaccgaccggcacatgggcagatggcgactatacgctgacagtgagggtggaagatgaggcggggaacgaaaaacactcagcgtcgctgacggtcactgttgatacccaaatcaccattgatgttattgaactggttaatgataacggtattcccggcgacaatatgactaacgacgcccatccgcagttccgcgtgacggtaccgggggacgttaacgaagtcagtctgagcattgacggtggcgtgacctgggttaaggcgacacagagcgcgacgccgggcgtctggaattatacctggccgggcaccgtgccggatggcgactatacgctgaatgtgaaagcgactgacaatgcgggtaatacggtgacggagacactccacttcactattgatactacgttgtcgacgccggtgatcgtactggatagcgcggacgacagtggtgtccatggcgataacatgaccaatcacacccagccgacatttgccctgcagcatattgatgatgatgccgttcgcgttacggtcagcgtagagcatggcggcgtcaccaccacatttgacgccacgaaagacgcaggcggatggacctttacgccgacaggggcgtgggcggatggtgattataccctgagtgtgtcagtcgaagataaagcggggaacaccagccattctgcatcgctgacggtgacggtggacacgcaaatcgccattaataacattgaactggtcaatgacagcggtattcccgacgataatctgactaataacgtgcgtccgcacttccaggtgacggtaccgactgatgtcaacgtggtgcgcctgagcattgacggcggcaagacgtggttcaacgcgacccagagcgcgacgccgggtgtctgggattatacctggctggctgatgtgggagaggggaagcataccctgacagtggaggcgaccgacaaggcgggaaacaaaacgacgcagcaactggacttcatcatcgataccctactgtcagaaccgactatcgtgctggacaacacggacgacagcggaacaaaaggcgataacctgaccaacgtaaataagccgacgtttttactgggcaatattgacgcagacgcgcggtatgtcacggttgaggtgcaacatggcggcacgaaagaagtgctgacggccaccaaaggcgcgaccggcatctggagcgtgacaccgaccggcacatgggcagatggcgactatacgctgacggtgagggtggaggatgatgcggggaacgtaaaatactcagcgccgctgacggtcacggttgacacccaaatcaccatcgatgttattgaactggttaatgataacggtattcccggcgacaacctgaccaatgacgttcgtccacacttccgcgtcacggtgccaggggatgtcaacgaggtacgtctgagtatcgacggcggtaatacgtgggttcgtgcaacacagggcacggcagggagctgggattacacctggccgaaagatgtgaccgacgggctacataccctgacggtagaagcgaccgataaggcgggaaataagacgacgcagacgctcgattttaccattgatacccggctgtcaacgcctaccatcgctatggatagcagggacgatacaggtgccattggcgatcatattacgagcgtcaaaagaccgggctttactattggcaatattgacgccgatgcgcactcggtcattttgcggatcacacagggcggcaatagccaggaagtgacactaacccaggttggaggacagtggcgctttacgccagatgctgactgggcggacggtagctatacgctgacggtagaggtaacggataacgcaggaaacgttcgtcagtccacgccgctggtggtgacggtggacacgcaaaccagcattactgatattacattggtcaatgatcatggcgtgcctgatgacaatctaactaatagcacccgtccgcagtttgagatcacggtgccggcggatgtgaattctgtgcaactgagcattgatgggggcgcaaactgggtgagcgcgacgcagggtatcgaaggcgtctggggctatacctggccaacggatatgggcgatggaaaacacaccctaaccgtcatggtcaccgacagagcgggcaatacggcgacgcaaacgcttgaatttttcatcgacacccggttgtcgacgccgaccattgcgctggatagcacggatgataccggtacgcctggcgatgatatgaccaatcgcacccgaccgacctttattctgcagaatatcgattcggatgttatcaacgttacagtcagcgtcacgcataatggaacgacaacctcgtttactgcgacacagggggctggaggatggagctttacaccgccagcgccgtggggcgacggtgattatacgctgacggtgacagtggaggatcgggcgggaaatacgcgtccgtctacgccgctgacggtgacagtggatacgcaaatagccattgatcgtattgaattagtcaacgatagcggcgtccctggcgataatgtgacaaaacatgtgcgtccgcagttccagatctcggtaccggatgatgtggaaaaggttcttctgagtattgacggcggcacgacctgggttactgcaatcaagagttcgacggctggcatttgggattacacctggccgacggatatgccagagggacagcataccctgaccgtggaagtgactgacggtgcgggtaataagatgacggagacgctcaatttcactatcgatatcacgttgttaacgccaaccattgagctagcgcccgatcaggataccggacagaataagaacgataatctgaccagcgtcactcagccggtatttgtgttggggagtatcgataaagatgttcgacacgtggaattgagtattgagcataacggcacgtttaaaacggtggtactcaccgaatcagccgacggctggcgctatcgaccggattctgctttggcggacggtagctacacattcaccgtgacggtaacagatgtggcaggcaaccagcaaacatccgcgcctttaaaggtgacgatagacggtacgttgactacgccggtgattgaactggcagctggcgaagatagcggtactgttggcgatcgcctcaccaatcacgatcggcctgtgttcgacatacatcaggttgattctgacgttacgcgcgtgatggtcaaagtaacttacaacggtaaaacgcacgaggaagcggcggtattcaccaatggtcaatggcgctttacgccttctgcgagctgggctgatggctcatatcagttagccgttgtggtggaagatctggcggggaatgtaaaagagtctgcgccgtttgaggtgcgtattgataccacgacaaccattaacaatatcgtattgcttaatgataccggcgtgcagaatgatcaattaacgaatgttgccaaaccgtcattcagaattgacgttcccggtgatgtcgtccaggtacgcgtaaccctggatggtggcgctaactggaatgtgatacgcaaaaatgccgacggacagtggatttttgacagcccgaatactctggttgacggcacatatacccttcgcgtagaggccacggatgaggcaggtaatattgcgaataaagatttagtatttaatatcgatactaatatacaggttcctactattgctttagacgcaggacaagataccggagcgaataccgccgataatattactaatatttcacgacccacctttacgattggtaatgttgaccccgatgttatcaaagtcgtggtgacgattgatggtcatgattataacgcgactaaggttggggctggttggcaatttacaccaggcaatgccattccggatggttcttataatattaccgttacggttgaagataaggccggaaataccgcgacatcgaaaccattacctgttgtgatagatacgacggctgaaattgaaagcgtcacgttggttacagatagcggtgatagcgatgtagataacattaccaaagtcgacaagccgcagtttagtattgttaccgctgatgatattacccatgtgcgcgttaaaatcgataacgccgctaattggattgaactcacaaaaggaggggatggccgctggatatttaatgtcggttcggcattacctgatgggcaacacactctcttggttgatgtgactgatatcgccggcaacgttgcgcaagaaacgctgcagtttacgattgatacgactctgcgagagccgacaattgtactcgatcccacccatgatactggtgatgatactaatgataatcttaccaggattaacaaaccggtgtttattatcggtaatgtcgataatgatgtatcacacattgtggttcatattgatggtcgggattacaccattgaaaacacaggggggaatttaacctttacgccggatcaaccgctgtctgacggtcagcatacgatctctgttaccgtaacggatattgctggtaataccaaaacatcggccgaactgcggattgaaatcgacacgcaggttcagattgacagtgttacgttaacaacagatagcggcgtcaacgatcacgataatgtcaccaatgctacccgtccctcttttgaaattgcaacgcctgatgatgtgacatcggtgctggtttctttcgatggcgtaaactggacgcccatcagtaaaaatgcggccgggcagtgggaatttactgcaggtagcgcattgcctgatggtcattatactctccatgtccaggcgacggatcgggcagggaatacggcaaattccacgctgggcttcaccgtggatacgcagattgacggcctgagcgtcgtgatgctggacgacgccggaaaggattctacggatggtattacgaatattacctctccacgttttgaaatttcagccagagaaccgctgcagagcgtgacggtaattttaaacgggaaatccagcacactgactcagggggcaggtaataaatggctgtttacccctgatacaccgttagtggatggaacttacaaaatagaaatagtggctgaagatatcgcaggtaataaaattagcaaagaggtatcattcacaatagacactattgtttctgatcccagtattgatttgctggatgcggatgatactggcgaaagcgctgttgataatattacgagtgtcactacaccacgtttcgttattggcaatgtacccgccgatattgatactgttgtaatcagaattaacggcgtttcttatccggttacggcaaatggcaataacctctgggaatttcaggttcccgttgcgttaaacgatggcgtatatgaagccgttgttgtcttcagagatattgccggaaatacttctgaaactaagctgccctttaccattgataccacgacaagcgtcagtgtcagaatggagccagcgtctgataccggaaattccaatagcgataaccttacgaataagcaaaatcccaaattcgaaggtactgcagagcccaatgcgaaactggtgattaccattgttgacgataagtcaggtcgggaggttttaaaacaaacgattacggttggcgctgatggcaactggagtgtgacgccgaatatactgccggatggcatgtataccatcaacgtcgtcgcaacagatgtcgcgggaaatactgcgcaaacgcaggaaagattcactatcgatacggttacgatcgatcccaccattcgcctttcggatccatctattgatgatcagcatgaagcaaccagcctgcgtcctgagttcaaagggtttgccgaagcgttctcgacgattatgattcagtgggatgggaaagtggtcggctcggcaaacgccaatgcgaatggcgaatggagttggacgccgccatcagtattagcgccaggctcctatgttgtgagcattgttgccaaagataaagcgggtaatgaatcgtcgcaggtcgactttcctgtcgtaatacctgttattgatgtcacgcctccaaccataaagctcagcgaggagagcgatagtggcgccttaggagactttaccacgaataataaaacgccgaccctgattgggagcacgttacctaatacgattgtgagtatttatgtggatggcgtgaaggtcggcgaggcgacagcggatacagcgggtcgatatactttccagttatcggaaatgaaagatggccattatgtcgtccaggtgggtatcgtcaaccctcgcgataatagcgaactgcgttctaccgccgttgatgtcactatcgataccgaggttgctgaactggtatggaatatatctggaatgcatgagggcggatatatcaatacggtgacgccggagattggcggcaccagtgagccaaacagcaaaatcactatctttgtgaatggcgttgaaaaagcgattgcttatacgacaggcgcaggacactggggcgtagtattacccgctttgggtaatgacggtaattatgaattaacgtttaaagttgaagacgttgccggtaatatcagagagtttggtccgcagaatgtaatactggatacagtaatttcgccgttaaccgtggtattacgcgaagctgatgacagtggcaaagttggcgactggatcaccaataaatctcatgtcaccatcgatggtactgccgaagccggaagtactttaaccatcaggaatccgcagggagtggttattgctaccctggtggtaggcaatgatggtcgatggagcgcagaattagatctgcgtgaaggtagtaatgcctttgtcgtggtatcggaagataaagcgggcaacagtcaacaaaaagagattctgatagaacatgatacgcagattgaaatcagcgatatttcattaagtcgggatactaatagcggtgataaatatgatctgattaccaataataagtctccggtactggttgccatgaccgatcccggcgcgacggtacaggtttatattaatggtgtgttacaaggcacagtagaggcgagttcgtcaggtaatattagctataccatgccggcaaatagcgccgacggcgagtatcaggtgcaatttgttgctacggatactgctggtaaccgggttgagtctgcgattacaaccgtgacaatcgattctcaaattgctgtctttgatattgatgaagattcattaccggccctctctaataaccgagcgttgtcagtctcaggtgtcggggaggctggttctcaggtcagcatctttgtcgatggtaaattagtcaacgttgttatggttgaggctgatggcacatggcgcgcgccgatactgctgcaagatgatggtacgtttaatattcatttcagcattactgacgttgctggcaacactgaagtgagcaaggattatagcgtggatgtcgattcatcaaccgacttcccaacgctcaaccttgaagatgcaagcaactctggttcacttgacgatctgattactaatcacaacaagcctgtattagttggcaccgcagaagcgggagccacaatccatatttatgtggatgaaaagatcgtggcaaatgttcttgtgcttgaagatggaacctggtcctatcagtttgataatgcgttaaaagatggtgaatattctatccgtgtggttgccgaagacccggcaggtaatacggcagaatcgcctcgcttactcgtcacgatagataccagtacgtttatcgataatcctgctatggtggcaggttctgataatggtattttcagtaatgatagtataacgagtcagacccggcctacgtttagtatttttggagaaatgaaccagagtgttcagattttcattgatggagtgctagtcgatacgatcacggtgaccgacagaaatcaagtttatcgacctgagtcaccgttgggcgatggttcccatagcatttattatgttatcaccgataaagcaggcaacacggctacctcgaaaacgctaaactttactatcgatacctttaatacgacgcctgtcgccattgattctatcggtggacaaacgttagcagagatgaccggtagtgatggcaaaatatatataacggacacgacgcgtaacttattgtttagtggcagtgccgagcccaatagcaaaatagaaatcatcattaatggcttaaatgtgggggaagtttgggttaatgaaaaaggccactggcagatgccggtgaacccgctttatttcacagaaggccaactggatatcactgttaaatctacggaccgtgctggtaacgtaaatcaggaaaagtattccatttgggttgatacgcatatcaaggtatttaccagcgagcttgatgacaataaatcatcatcgaaaacggaatggtggagtaatagcgatctcattaccatgcgaggcacgggtgaaattggcgctacggtatcattaatcgtggctggcgtcacgctggcaactgctgttgtggcggcaacaggacgatgggaattatcaacagacaagcttccagaagggacttacgatattagtttggtcattgaagatagcgccggaaatcgttgggaagatgtgcgtgaaatatttattgaccgaacgccgccaaatgctccggtcgtaacgtattcagatattgtcaacgatctaattattatgcaggggacggcggaagccaaatctcagctaataataaccgatagtgaggggaatacttatacgttaaccgttcctgataatggtaaatggagtatggctatcccgtatccatcagaagggaagtttaccattacgagtgtggatgctattggtaaccggagtgatgatgtccctctcgatatcatgaaagaggttcccgttatttcattatctccagactcagacagtggtacggtgggcgataatattacgcgagataagcaacctacctttattatcgggaatctggaaagcgatgttgtggtcgttcaggtcgatatcaatgggaccgtatataatgctgaaaaaaatgccgatggcgtttggttctttacgccaggtacaccgttagctgatggttcctatacgatatcggtaatcgcaagcgatgccgcgggtaatcagaaaaactcgttacccattactgtcacgatcgacagcacgctgacggtgccggagattgcgttggcagcaggtgaagacaatggcgcttcagacagcgataacgtgacgaatcacacccagcctaagttcacgctgcagcatattgatgctgatgtgaccggggtgaccgtaaacgtgacgcataatggcgtgacagacatctatcaggcgacgcaaggcgcggatggctggaccttcacgccgccagccgcctggaatgacggtaactacacgctgagcgtgacggtggtggatcgcgcggggaattcacagcaatctgcttcgctagcggtgacggttgactcaacggtgacggtaacagcggatagccagcatgacgatgcgagcgatgacgccacggcaacagcggttactccaccggagtctgaaacagtgaatgccgaaagcgctacgcatcttcgtacagagccgtctgcggcggaagaaagcgtggtgaaggtgacagcctatagtattacattgttaaacgctgactctggggatgaaatagatcgttcaattagtcagacaccttcttttgaaatatcagtacctgagaatattgttaatgtcagtattatgtttgaaggagaagagtttactctgccgataactaaccagaaagcaatattcgaagttccgctatctttggaagatggtgaatatactatggacgtgaaattcattgataaagacaatgatttcctgattaaggagaaaacattctcagtcgatcactcctcggcggatattgtgaacgcaatgaatgtaagaggaaagaccgaggatgatattaatgattccccttccacgagttctgtagggcacaacaataacggcgctattgatgttttcgccgttaatgaagttacgctacctgtagataatcaagaagaacacgcataataacggaggcccctcacctttgggtgagggggtttacttatggataaaaaactagaaccttattatttaagtgcggaaacggcattatctatagtgtctaaaaaattcaacataaaaattgacatcaaagaggatgatataaatttaagatttaaaaagtacgacagaaataacactgacgactctatacaaatgaagaatttctttttgtcgttagggctttctctacaggatatattatttaataatggtgaggatttactaaatgagcctatgccgattttactattaacaccagaaatgaagtggatggtgtgtgtgagtggcgggcaaaaaataaagttggtaaacgcgcgcggtgaactctgttatgttgaaattgaagatgaatatttaaaagagttatctgcatttagtatactacctttaaataaagttgttgatagtataagagtaaaaaatatcataaaaaactctttatcgatgaacaagattttttatactaaatactttttttcatctctttttatggcaatttttgcgttaactatcccagtatttagtaatctgttctatgataagcttgttccaagcgcttcggtttcatctttatttggcgtggctataattgttgctgtatttattgtttttgagtttatccttcgtacttcgaaagatatttatcagtctatcacagcaaggcaggatgacgtcgatattgatatcgcatttcttgaagcggtactttatagtaaaaagaaaaatggcagatccatgtcatcagcatttgtgctatggaatgagtttcagaaaattaaacccgttttattaaactcgatctttcaacgtatagccgatattccaatatttattatatttctcattgttatatatgtaaatttaggtctggttgttattgtacctattaccatgtttatcgtctctattattatttccctcgttaaccaccattatactaatgagttaatgaacaaacaaaaagaaggacagaagaacaggaatatttttatctcagaagttttcttatctattaaaatgatccataccttaaataatcaaggtttactttttgattgggttaatacatcaaatgaacagtcgtatcttaacctgaagataaggaaattaaatcttatctatcaatctatattggggagtatgtcatctattacccaaataactattatggtaatagccttttttatggtaatcaagggtgatgttactactggcgcaattgtttcatctgtcattgtctctggccgtatttccgggatcatttcgaatttttcttctacattaatctctattttatcagcagaaaaaaccggtaaggatctgctttctttttttgatgaagatcaggcagaaaaaacaccggcattacagtcaatatcaaagtgcaatggcgatatctctatccggggcgtgagttatcagtatgatgctcaatctccgatgattattaaccgactgtctatagacatacctgcggggcaacgtgtcgcggtggtaggcgaatgcggagcaggaaaaagctcattactgggaatgctatctggctacctttcgccaacagacggtgccattttatatgatggatataacttaggacatttatcgcagaactttttttctcagcatttaagcgtggtgacgacacatgatgttttattcaccggaaccattgaaagtaatttcgcgttaaaaccgcaaaacgacaggggccgggtactcaaggcgcttcagctggcgaactgtggttttatcttgcaacatcctatggggctgaagtttccggtgaattttatggctaaaaacctgtcatccggacagcagcagcagttattattagcacgtagtctgagtagtgacgccagcgtctttttatgggatgaaccaacatcaaatctggatgagaataccgagaagcaaatttttgataacttagatgagtttattcatgggaaaacgttgatcatggtgacgcatcgtcgatatctgataaagtattttgaccgggtcctggtaatgaaaggtggaaaaataatccgtgattgttctccggataaattattaatgtaaaataagcagcgcttgtcgctgttatcaggtggtactgcttaataaaaaagacccgttgcacaaacgggtcttttttgtcatttaacgagtcggcaacgtcttcaataagtttagctcgattctgttagggctattccacttgccatttttggataaccacacctggcggccctcatcaacggcaatgcgagggacgtgatggtgcgcaaggctacccctggcgcgcgattccgcgttgagataaccggtgggcggcttcagcggcagcgatagcgtatcaggtcagcaccatcggccattctggcggggtctggctcatcgtttcgaccattacggcttcaatgttatgccagatcgcagcgagatccatcatggtaataccgagtaaaccggtggcaaaccagcaggcggataccacgcccagaccgctactgatcaccgccagaccaatataatctgatttacggaaacggatattgagcgtgctggctaaaaacatgagcacggcgctcagcagttgccagcggagaagaacgacaccagtggttatggcagccatgaaacatttcctctgaatagacctttgtccaggacagcacggcgttgttcccgggaaacgtgggacattctggctatcaacggacatcacatcaacatcgaatgaaacattgtttctatttcattgtttttgtgaactatatcacaaaaaccagcttgttcgccagatcggcaatgtattttttgtgcgttttataaccgtattttttgtgtgacttctacgcgtccgtagagaaactgccggaaagcaaagatgtattattactactcttttattttttttcgtgaaattcagacctgataaaaatatcaagttatttatcaaaagaaaggagtaaagatgtataccccatcgtttacttgagtataaatctgatattatcaaaaatatttagtgtcctgcctggtatgcgaaagagattgcgcgtagttattaatggtaaatgttgatcggtaaaagtctgttgctaatattgataaattcatgcaccgtaaacctccatttggttcacgtcttattttgccaacaatagtcacaaataatgcagggaaataggctgaaaatgagtcaaagcacacgacgcaaggtgttgagatttctcggaacgatcattgtggtgttacttcctatattgctggcgatctggtttgctcatatccgggcagtctctgaaaccagaaatcagttacattcatttgcgcagttggtattagataaaacggagcgggttatcctgcaagcagatttagcccgcgatgccgctgaacaatatcaggggcaagcctgtacgccagcccatcaacagcgaatgctgaatattatccgcggtcgtttgtacattaatgagttgatttatgctaagggccagcgttttctatgctctacggttatgacgccaacaagtccttattttattccccgcgctgactataaacgaaagcctgacatcgctatttattactatcgtgatacgccttttttcaacggttataaaatgacatatatgcagcggggaaactatgtcgcggttatcaatcccttatcttatagcgaggtgatgtcagacgatccggcgttggcctggggaatgtatgatacggtgaccaacacctttttctccctgagtgaacaggcgcaggctgatcagctattacctttggtacgacggagtgaacctgtgttccaacagggtgagcgtttttatactctggttaaatcagcaaaacgaccggttgccgcgattgtgtcaacctcaaagcaacgcttttaccagaacctctttcatcagcttacgttaacgctaccgttagggatcatctgtagcattatcatcttatttatgtggtcacgatcccggcaggcatattactcaccgcgtcgattgctgcaacgggccattaccaggcaccagctttgccttcattatcagccgatcattgatatccgaaacgggacatgtgtaggtgccgaagcgctattgcgttggccgggctatcacggtccggtgatgagcccgtgcgaatttattccgctggcggaaaaagaggggatgattgagcagatcaccgattatgtcgtcgaagaggtatttaatgatttaggtggttttctggccgcgcacccgcatctttatgtctctatcaatctcgctgccgccgattttctctcttcccgactaattgtgatgattcatgaaaaaacgcgtcagcattcagtgcttgcgcaacagataaaggttgaagtgactgagcgcggatttattgatgtgcctaaaatgacgccgattattcaggcgtttcgccaggcgggatacgaggtggcaattgatgactttggtaccggctattcgaacttgcataacctgtactcattaaatatcgaccttttaaaaattgataaatcttttgtcgacacgctaaccactaatagcgccagccatttgattgtggaacatattattgaaatggcgcaaagtttgcggctaaaaatcattgctgagggggttgaaacggctgaacaggttagctggttgctaaaacgcggcgttcagtattgtcagggatggcactttgcgaaggcgttaccaccgcaggaattcatcgcctggctacaacaaacgcccgcgcctctgacgatacgcgggcagacgccctacaggcggtgacggtaatcgctgggagtgcgatcgaactcgcggcggaatacacgcgagaaggtttgctgcgatacatagcccaggtccatcgcgatatcaaaaatcgggcgctcggtcgttcgtagctcaacggccgccaacaggagacggcgctggcgaatatactcgcctaatgtttgatgcgttaccgtacgaaacatccgctgcaaataccacttggagtagcccgatttttttgccaccacatcaatgtttagcggttggtcgatatgttcatcaatccattcgataagggtctgaattatctgctgatgcgacatattgttgcctcttaaacagtattcgattcgtcgttttgtctgcgggcgagtataattcctcaagttaacttgaggtaaagcgatttatggaaaaaaaatctccccgtttaaaagccttactgacgccgggggaagttgcgaaacgtagcggtgttgctgtgtccgccctgcacttctatgaaagcaaagggctaattaccagtatccgtaatagcggtaaccaacggcgatacaagcgtgacgtgttgcgttatgtcgcgattatcaagatcgcccagcgtatcggcatcccgctggcaactatcggcgacgcgtttggtatcttgccggaaggacatacgttaagcgcgaaagagtggaagcagctctcatcgcagtggcgcgaagagttagaccgacgtattcatacgctggtggcgttgcgcgatgagctggacggttgtatcggctgcggctgtttatcgcgtagcgactgtccgctgcgaaatccaggcgacaggcttggcgaacacgggacgggcgcccggctgcttgaagatgattaacatgcactcggccatcgggctgagctcacctaaaactaaagcgccgctaagggcgctttagtttgtttccggtctttgtctttcgctctatcccgctgattacaggagggtttcccccgacgtcaacacccctcatatcgagcacgtggtggaggttccggtttgtgttgatactgtaagtgtaagcgacgacgccctgttcgccagcgaaatgctgattttttagccgaaatttttacggcaactgccataattttctatagttagttggcataccttacaggagacagccatgctgacggtgcaccatttaaatcagtctcgttcgcagcgcatcttgtgggcgctggaagagctggcgttgccttaccagattgtgcgttaccagcgtgaaaagaccatgctggcgccgccggcattgaaaaaagtgcatccgctgggcaagtctccggttatcgaagatcacggtatggttattgcggaatcgggcgccatcctggaatatttgcaggacacttacgacagtatcggacgctttaaacctgcggatgcgcaggggaaacaacactatcgcttctggctacattacgctgaaggttctctcatgcccttgctattgatgagactgctctttacctctctgggtaaaccgccggtaccattgggcctgcgaacgttgggcggcgttatcggtaagggcgcgcaaaaagcgtacctcaatccgcaactggaaacccatgcgcgctttattgacgggcatctggcaaatcacccctggtttgccggagagcagttaagtatggcggatatccagatgagcttcccgctatttgcgctgcttgcccgaggcggaatcgctcatctcgaccatatcaacgcatggaaagcgcgggtagaaatgcgtccagcctggcagcgagcgattcagcagggcggtccgtttaccattcccggcggataatggcgtttttgtgagcagattgcgcaacgtatttgctaacagcgatgcgaaaaattgttgctggattgcgcagggacgataacgtttgcgcatcgtctggcgatttattgagcatactaagcagaaaagcataaaaagcggcaaagttcagttgaaaaagcgttgatgatcgctggataatcgtttgcttttttttgccacccgttttgtatacgtggagctaaacgtttgcttttttgcggcgccccggttgtcgtaaatgtagcacaaggagataacgttgcgctgttagtggattacctcccacgtataccgacgaataataaattctcaggggatgttttctatgtctacgccttcagcgcgtaccggcggttcactcgacgcctggtttaaaatttcacaacgcgggagcaccgttcgccaggaagtcgttgctggcttaaccacgtttctcgcgatggtttactccgtcatcgtggtgccagggatgctgggtaaagccgggttcccgcctgctgccgtctttgtagcgacctgcctggtcgcaggcgtcggctctattgttatggggctttgggcgaatctgccgctggctatcggttgcgctatctcgttgacggcgtttaccgcgtttagcttggtcctggggcagcatattagcgtcccggtcgcgcttggcgccgtattcctgatgggcgtactgtttaccgttatctccgccaccggcattcgtagctggattttgcgtaacttgccgcagggcgtggcccacggaaccggtatcggtattggcctgtttttgttgctgattgccgccaacggcgtcggcctggtcattaaaaacccgctggatggcctgccggtcgcgctgggcgatttcgataccttcccggtgattatgtcgcttgtgggtctggctgttattctcggtctggaaaagctgaaagtccccggcggcattctgttgaccattattggcatttctattgtgggtttgctcttcgatcctaacgtccatttttccggcattttcgccatgccttcgttgagcgatgaaaacggcaactcgctgatcggcagcctggatattatgggcgcgttaaaccctgtcgttctgccaagcgtactggcgctggtgatgacggcggtgtttgatgcgaccggcacgattcgtgcggtcgcagggcaggctaatctgctggacaaagacggacaaattatcgatggcggcaaagcgctaaccaccgactcactgagtagcgttttctccggcctggtcggggcggcgccagccgcggtgtatatcgagtctgcggccggtacggcggcgggcggtaaaacgggcctgacggcgattaccgtgggcgtgctgtttttgctgatcctgtttctttcgccgctctcttatctcgttcccgtctatgcaactgccccggcgctcatgtatgtcggtctgctgatgctgagtaacgtggcgaaaatcgattttgctgatttcgtcgatgcgatggcggggctggtaacggccgtatttattgtactgacctgtaacatcgtcaccgggattatgatcggctttgccacgctggtcgtcgggcgtctggtttccggcgaatggcgtaaactgaatatcgggactgtcgtcattgcggtcgcgctggtcgctttttatgccggcggctgggctatctagctctgccttcattctgaaaaacgggcggcgttggccgcccgttttcattttcaggacacatcacgttaccttttgcgttaatctgaagaaggtgaaaccgaggcatgatgcctctctccatcataaaaaacatcgcaaacagggaacgcatggaaattttcttcacaatactcatcatgacccttgtggtctcgctgtcgggggtatttacgcgtgtattacccttccagcttcctttaccccttatgcagatcgccgttggcgcgctgttggcgtggccgacgtttggtttgcatgtggaattcgacccggaactcttcctggtgctgtttattccgccgctgctgtttgcggatggctggaaaacgccgacccgtgaatttcttgagcatggacgagagattttcgggctggcgctggcgctggtcctggtaacggtcgttggaatcggcttcctgatttattggctggtgcccggcattccgctgatccccgcctttgcactggccgccgtgctgtcgccgaccgatgcggtagcgctctccggaattgtgggcgaggggcgtatcccgaaaaaaatcatgggcattctgcagggagaggcgttaatgaacgacgcctccggtctggtatcgctgaaattcgccgtcgcggtggcgatggggacgatggtctttaccgtcggcggcgcgacgctggaattttttaaggtcgctatcggcggtattctggcgggttttgtagtcagttggctgtatggccgctcgctgcgttttttgagccgctggggtggcgatgaacccgcgactcaaatcgtcctgctgtttctgctgcccttcgcgtcttacctgattgccgaacatattggcgtctcaggcatcctggccgcggttgccgccgggatgaccatcacccgttctggcgtaatgcgccgcgcgccgctggcaatgcgtttgcgcgcgaacagtacctgggcgatgctggaatttgtctttaacggtatggtctttctgctgttgggactgcaattgccagggattctggaatcttcgctggcggcggcggaagctgacccgaatgtcgaaacctggatgctctttaccgatatcgtgctgatttatgcggcattgatgctggttcgcttcggctggctgtggaccatgaaaaagttcagcctgcgctttttgaagaagaaaccgatggagttcgccagctggacgtcgcgtgaaattctgattgcttccttcgctggcgttcgtggggcgatcaccctggctggtgtgctctctataccgttacttttgccggatggcagcggatttccggcgcgttatgaactggtattcctggcggctggcgtcattctgttctcgttatttgtcggcgtgatcatgctgccgctgctgttgcaacatctggaagtcgccgatcatgcgcaacagttgaaagaggagcgtatcgcccgcgcggcgacggcggaagtggcgattgtcgccattcagaaaatggaagagcgtctggcggcggataccgaagaaaacatcgataatcagttgcttactgaagtaagctcacgtgtcattggtaacttgcgtcgccgtgccgatgggcgaaacgatgtcgaaagctccatacaggaagaaaacctggagcgacgtttccgtctggcggcgctgcgttccgagcgcgccgagttgtatcatctgcgcgccacgcgagaaatcagcaatgaaacattgcaaaagctgctgcacgacctggatttgatggaagcgctactgatagaaaatcagtagtccttgtggcccggtggcgccatgctttccgggcctacaagtaggccggataaggtgcttgcgccgccatccggcaagggtcttaacccatggcttacggttgtttcagccaaaacccttcgcaacaggttaaccatgcccgggcgctgtgcgacagatacacgccctctcgccaaatcatgcccaactgccagcggagatcgctttccagcggtagccagcgcagcgtggccttatccagacgctgacaaatcggctccggcaaaatggcgatgccgacgcccgcttgcaccatggcggcgagaaaatcccattgcccgctgcgcacggcaatccgtggttttacgtcatgctggctaaataaggtcatcaactggcggctcagggcaaagtcttcgttatagataagaagaggatgctccgccagagcttcaggcgcgatggagtcgccggttgtccactgaccggaacggggaaccagcacgcacagcggatggctgaacagcgataacgtcgtcagcccgctcgcttcttccaccgggagcgcggtcatcgcaacatccagctcgccattcattaccgcctgctgtaccgtcaggccgccaaactccgaaattttgagttcaacgccagggtagcgttgtcgaaacaaactgattggcccggccatcaacatgccgaccatcgggggaatacccagccgcagcacgcccttattgagatggttaatatcgctcaactcggcctctaactggcgaaactcagcgaggatcgccagaccgcgttcaaacaccacgcgtccggtatcggtcagcaataacttacgtccgtcgcggatcagtagcgtacagttaagctcatcttcaagatttttcagcattttgctaatggtgggctgggtgacaaataacttctccgctgcgcgggtgaaactttgctggcgcaccacctcgacaaaataacgcagcgttctgatatccatgattattccttccgactatgcctgcaatgattttaattcatttctgcccgtgacggaggttctctatactggcgctccgtattatttttcaggacattccctcatggctgtggcgataagccgcgttacgcctgccgttgtgcaacgactccaggtaccggttcaggtactgctctatgcaggtttattcattttttcccaatatcttgtctcctggctgcacctgccgttgcccgcgaatctggtcggcatggtgcttatgttggcgctgatcgtttgccggattattccgcttagctgggtacgcgcaggcgcacgctggctgctggcggagatgctgttattctttgttcccgccgtcgtggcggtagtgaactatgcccatctgttactggtggacggctggcgcattttctcggtgatagcgatcagtaccttaatggtactcggcgcgacggcgtgggtggtggataaagtgtatcgctatgagatgagcaggctaaaccgtgaataacgttcagttaagcgtactgtgcctggtgattacgctgggaatttatttcgccaataagcgcctgtatcgccgttttcgcaaattgccgttgatgccattagtgctgacgccggcactgctggtgttaatgctggtgttcggtcatatctcctggcaaaactacattggtgaatcgcactggctattgtggctgctcggcccggcgaccattgcctttgcggtgccggtgtacgataacctcgcgattatcaaacgtcactggatgtcgctcaccgcgggcgtagtgacggcgacggtggtggcagtcaccagttccgtttggctggcgcgtctgttcacgttatcggatgagattcagcgtagtctggcggtacgttccgttaccacgccgtttgcgctggcggcggcagaacccctgggcgggcagccagatctggtggcgctgttcgtggtcgtcactggcgtgtttggcatggcggtcggcgacgcgctatttttgcgtctctctatccgggaaggcatggcaaaaggggcaggattcggcgcggcgtcacatggggcgggcacggcgcgttcctatgaacttggtcagcaggagggcgtcgtcgccagtctggtaatgatgctgtccggcgtggtgatggtgctggcagccccgctggtggcgagggtgatgttctgattttcctccgacccacagggccggaggaaacggtaagattaatgcgcacgcccttgttgtacgccgaatcccgtttgggagcggataaactgagcgcggaactgctcacgttcacggttgccttctgccgagttatcggtggccgagaagaaccagatccccaggaacgccacgctgatagagaacagcgccggatactcatacgggaagatcgctttttcgtggccgaggatctgcacccaaatggtagggccaagaatcatcagcaccaccgctgtcagtaaacctaaccagccgcccagcatagcgccgcgcgtggtcagttttgaccagtacatggaaagcagaatgatggggaagttgcagctcgcggcgatagcaaatgccaggcccaccataaaggcgatgttctgattttcaaacaggacgccgaggataatggcgatcacgcccagcaccaggacggtgattttcgacaccttcagctcttcacgttcggttgcgcctttgcggaacacgttggcgtacaagtcatgcgacaccgccgatgcgcccgccagcgtcagacctgcgaccaccgccagaatggtggcaaacgccactgccgaaataaagccgaggaacaggttgccgcctaccgcgttggccagatgcaccgccgccatgttattgccgccaatcagcgcgcctgcggcatctttataggcgggattcgcccccaccagcatgatagcgccgaagccgataataaaggtcagaatgtagaaatagcccataaaaccggtggcgtagaacacgctcttgcgcgcttcgcgggcatcgctgaccgtaaagaaacgcatcagaatatgcggcaagccggcggtgccgaacatcagtcccagacccaacgacaatgccgaaatcggatcttgcaccaatcctcctgggctcataatcgccgtgcctttcgggtgtaccgccatggcttcggtaaacagattattgaagctaaagccgacgtgtttcatcaccataaaggccataaaactggcgccaaacagcaacaggacggctttgataatttgcacccacgttgtcgccagcatcccgccgaacagcacgtacatcatcatcagcacgccgaccagcaccacagcgatgtgatagttgaggccgaacagcagttcaatcagtttaccggcgccgaccatttgggcgatgagataaagcgccaccactaccagggagccacaggccgaaagaatacggattggcccctgtttcaggcgataagaggcaacgtcagcaaaagtataacgtcccagattacgcaggcgctcggcaatcaaaaacaggatgattggccagccgacaaggaagcccagcgaatagatcagcccgtcataaccggaggtaaacaccagcgcggaaatgccgagaaatgacgcggcagacatatagtcgccggcaatcgccaggccgttctggaacccggtgatattgccgccagcggtgtagtagtcgctacgggaacgtacgcgtttagaggcccagtaggtaataccgagcgtaaacacgacgaaaatcaaaaacatgataatcgcctgccagttggtgggctggcgttcaaccgcgccgctaatggcatccgccgcatgagcggcgaaggggagtgcggcggcaagcgccgtcagaactctcttcataatactttcacctcatgcagtacggcgttattaagacgatcgaattcgccgttcgcccgccagatataaattccggtcaacacaaaagaaatcacaatcaccccgacgccaatgggaattcctcgggtgacgctggttcccgcatgtagaggcgtgcccagccagccaggcgcgaaggcgatcagtaaaataaagctgatataaaccgccagcatgataaccgacagaatcgtggcaaaccgttgccgtttttcaactaattccctgaaacgcgcactgtcttctatccgctgataaatttggtcattcatcacagagctctccagaggtccccctgcgtctttcgcgctacaggcgcgttggccgcactcgcgcgccccagccacatagtgaacttgaactatgctgctgagggtgtgctcgcttgccgccttcctgtaacacgaaatcctttgggggagggttttttatatttccctctcccggtttgagagagggcaggggtagggtcgtaggccggataaaacgcgttcgcgttgccatccggcatttatggttatgacggcatcgcgatggcctgcttctcttcgagcagtttctccaccacgccaggatcggcgagagtcgaggtatcgcccagattgctggtatcgcccgccgcgattttgcgcaaaatgcggcgcataattttgccggaacgggtttttggcagtgagtcggtccagtgcagcacgtccggcgtcgccagtgggccaatctctttacgtacccagttgcgcacctccgcgtacagttctggcgacggctcctcgccgtggttgagcgtcacataagcgtaaatcgcctggcctttgatagcgtgtggaatacccaccaccgccgcttcggcgatcttcggatgcgccaccagcgctgactcgatttccgccgtacccagacggtggccggagacgtttaacacgtcgtccacgcgaccggtgatccagtaatagccgtcctcatcgcgacgcgcgccgtcgccgctgaaatacatattcttaaaggtagagaaataggtctgctcaaaacgttcatgatcgccgaacagagtgcgcgcctggcccggccaggaatcggtgatgaccagattgccttccgtcgcgccttcttgcggatggccttcgttatccaccagcgcaggctgtacgccaaagaaaggacgggtggcggaaccggctttcagttcgatagcgcctggtagcggcgtgatcataaaaccgcctgtttcagtctgccaccaggtgtcgacgaccggacatttttccttgccgatcttcttccagtaccattcccacgcttcgggattgatcggctcgccgacggaacccagaatgcgcagtgaagaacggtcggtgccttcaatggctttatcgccttccgccatcagcgcgcggatggccgtcggggcggtatagagaatgttgacctggtgtttgtcgaccacctggcacatgcgagcgggcgttggccaattcggcacgccttcaaacattaaggtggtcgcgccgcaggccagcgggccatacaacagatagctgtgccccgtcacccaacccacatcggcggtacaccagtaaatatcgccagggtgataatcaaagacatacttaaaggtggtcgcggcgtagaccagatagccgccggtggtgtgcagcacgcctttcggcttgccggtggagccggaggtataaaggataaacagcggatcttcggcattcatcgcttcaggctggtgctcagggctggctttttcaatcaaatcgcgccaccacaggtcgcggccttcttgccagtcaatgtcgctgccggtgcgcttcaggacgatcacatgctcaacgctagtgacattcgggtttttcagcgcgtcatcgacattctttttcagcgggatactgcgtccggcacgtacaccttcgtcagcggtgatcaccagccgcgagctggagtcgataatgcgtccggcgacggcttccggcgagaagcccccgaagatcaccgaatgcaccgcaccgatgcgggcgcaggccaacattgccaccgccgcttccggcaccatcggcatataaatcgctaccacatcgccttttttaatgcccagatccagcagcgtattcgcgaaacggcagacatcgcgatgcagttcgcgataagagatatgtttactctgcgacgtgtcatcgccttcccagataatggcggtgcgatcgccattttcctgcaaatggcggtcaagacagttcgccgccagattcagcgtgccgtcctcgtaccatttaatcgacacattgcctggcgcaaaggaggtgtttttcactttttggtacggcgtgatccaatcgagaatttttccctgttcgccccaaaacgtatcgggatcgttaatagactgtttatatttagtctcatactgctctggatttatcaggcaacgatccgcaatgttggcgggaatggcgtgtttatgtgtttggctcatgctgttgttctccttgtaggatgttaataatatgtcgcataaacgttaaatgtagggtcttaataagttttgtttagtatttgggcgacagatcacgcaaaaagggaactgtgcaaataagcagcaatctattttttgattgtgtcccgcaaaattagataaattttcgggataacatgacgttatatgaaattttttaaaaaagtgatccgtgtccggaaatcagaaaagagagggagttttgtccaggttactaactctaaagtggtattttacatacacttacaattgattaaagacaacattttaagtgtggttatttgttacacatagaggagatcaatgtaataacagtatttgtgcggttgctgttatggaaaacgataaaaaatcgccattaaagataatggcgcaatctggatgagacctctatggcaaggaaaacactacgcgcacgccgtttcttcagccttatatttccttttttcttcattacctctgtttacgctgagcaaacgcctgaatccgcaaaaaccgttactgttgaagcgaaaaatgaaatgttcgcgcctcaacaccccgaccaatatcagtcatggaaagcgacgtcagaacagtctgcccgtgaagatgcgctggcggaagaccctcgtctggtgatcctgtgggcgggctatcccttctcccgtgattacaacaaaccacgcggccacgcgtatgcggtaactgacgtgcgcgaaacgctgcgtaccggcgcgccaaaaacggcggaagacggcccgctgccgatggcctgctggagttgtaaaagccccgatgtcgcgcgccttatccaacaagaaggcgaagacggctacttccatggcaaatgggcgcgcggcggcccggaaattgtcaacgatttgggctgtgccgactgtcataacaccgcgtcggacgatttcgcccaggggaagccagcgttaacgttgtcgcgcccctatgccgaacgggcgatggaggctatcggcaaaccgtttgataaagcgggacgatttgatcagcaatcgatggtctgcggtcagtgccacgtggagtactactttgacggtaaaaacaaagccgttaagttcccgtgggatgagggcatgaaggtcgaaaatatggagcaatactacgacactatcgccttctctgactggactaactctctgtcgaaaaccccgatgctcaaagcgcagcacccggaatatgaaacctggagcgcgggcattcacggtaagaacaacgtgacctgtatcgactgccacatgccgaaagtacagaacgccgaaggcaagctctacaccgaccataaaatcggcaacccgttcgacaatttcgcgcaaacctgcgccaactgccacacccaggacaaagcgtccctgcaaaaagtggtcgccgagcgtaaacaggcgattcatgacctgaaaatcaaggttgaagatcagctggtacatgcgcacttcgaagcgaaagccgcatgggatgcgggggcgacagacgcggaaatgaaaccgattctgaacgatattcgccacgcgcagtggcgttgggatctggcgattgcgtcacacggtattcatatgcatgccccggaagaaggtctacggatgttaggcagtgcgatggataaagccgcggatgcccgtactaaactggcgcgactgctggcgaccaaaggcattacccatgaaattccgctgccggatatttcgacgaaagagaaggcgcagaaagcgattggtttgaatatgcaacaaatcaacgcggagaagcaggacttcctgaaaacggtcgtaccgcagtgggaagatcaggcgcgtaaaaacggtctgttaagccaataacctcacatgtgacaaatttgccggatgacagcgcaagcgctttatccggcctacagaagtcttgtaggccttaaagctgcgcgccatcaggcattatgtaatggagtgaatatgagcgtattacgttcgttattaactgctggggtgctggcgtcaggcctgttctggagcctgagtggaattactgccacgccaacgccgcaggagtcggatcaacgctggacggtcacccagcagcgtaatccggatgctgcctgtctggactgtcacaagccggacaccgaaggtatgcacggtaaacatacgggcgctatcaacccgaacaataaattgccgataacctgtaccaactgccacggtcaaccgtcgcttcaccaccgtgaaggggtgaaagatgtgatgcgttttaacgacccgatgtatacggtagagcagcagaacagcgtctgtatgtcctgccacttgcctgaacaactgcaaaaagcgttctggccgcacgatgttcatgttactaaagtgacctgcgccagttgccattccctgcatccgcagcaagacacgatgcagacgctaagcgagaaagggcggatcaaaatatgcgtggattgccacagcgatcagcgtactaacccgcactttaatccggcgtccgttccgttgcttaaggagcagccatgagttgcacccgacgtcaatttattacccgcgtcggcgcgctggcggcggtcagtgggatggcaggacgcgttgtagcgaacacgttgaatattaatggcgtgcgttatggcatggtacacgatgagtcattatgcatcggctgcacggcctgcatggatgcctgtcgggaagtcaacaccgtgccggaaggcgtatcgcgcctgacgattattcgcagcgagccgcaggggacgtttcctgatgtgaagtatcgcttcttccgccactcgtgccagcattgcgaccatgccccctgcgttgacgtctgcccgacgggggcatcattccgcgatgccgccagcggtattgtcgacgtgaatccggacctttgcgtcggctgccagtactgcattgccgcgtgtccctaccgcgtgcgctttatccatccggtcagtaagacggcggataaatgcgatttctgccggaaaaccaacctgaaagcgggcaaacagcccgcctgcgttgagtcatgcccgacgaaggcgctgacgtttggtaatctggacgatcccaacagcgatatttcccgtttgttgcggcagaaaaccacctatcgttacaagctggcgctgggcacaaaaccgaaggtctaccgcgttccctttaactatggggaggtgagccaatgacatccgcttctgcatttcattttgcatcactggtgtgggactggcccatcgccatctatctgtttctgattggcatctccgccggactggttacgttggcgattctgctgcgccgcttccatccggaggcgggcggttcggacagtacgctgctgcgcactacgctggtgttagggccgggggcgattattcttggtctgctgattctggtctttcacctgacgcgcccgtggaccttctggaagctgatgttccactacagctttacctcggtgatgtcgatgggggtgatgctgttccagttgtacatggtagtgctggtgctgtggctggcgaaaatctttgaaaaagaggtgattgccctgcaacagcgttggctgccgcggtcagggatcgtgcagaaagtgctgacgctgatcgcgccgtttcatcgcgcgctggagacgttaatgctggtactggcggttctgctcggggcgtacaccggctttctgctgtcggcgctgaaatcctatccgttcctgaataacccgatcctgccggcgctgtttctgttctccggcatctcctccggcgcggcggtggcgctgatcgctatggcgttacgccatcgtagcaacccgcacagcaccgaggcgcgctttgtacatcgcattgaaaccccagtggtatggctggagatcttcctgctggcggccttttttatcgggctggcgctgggcgatgacggcaaaatgcgcgcgctggcggcggcgctgggcggcggattctggagctggtggttctggcttggcgtcgtagggctgggattgattatcccgctgctgctgaagccctgggcaaaccgtagcgtcacgtttcacggcgtgctggccgtttgcggcgccagtttgaccggcgtgctgctgctgcgctttttcattctttatgcgggacagctaacggttgcataatctggacatcttccttcctgaagccggatttctggcgctgttgttgagtctcggggtcaacgtgctgaccccgctggcgacgtggtgcgggatggggcagcactggcgcggcgtcatgcgcctgacgacctgcggcgcgtggacggcgttcacgctgctgctactggcgtttgcgattctggttagctgttttctgaccagcgatttttcggtcgtttatgttgcgcagcatagccatagtcagttgtcatggggactgaaactggcggcggtatggggcggtcatgaaggttcgctcctgctgtgggcgctgcttctttcggggtggacggcgctattcgcctggcgctcccggcatgaatctgacgcgctttttccgctgaccctgagcatcttgtccttcattatggcctcgctgctgctatttattgtgctgtggtccgatccgttcctgcgtattttccctcccgccatggaagggcgcgaccttaatcccatgctgcaacatctggggctgatcttacatccgccgctgctctatctgggttatggcggcctgatgaccgcggcgagcgtagcgctggcttcgctactgtgcggcggctttaacgccacaaccgcctgggtttgctggcgctgggcgttaccgggttggtgcgctctgacgctggggatcattctcggatcgtggtgggcatattgcgaactgggctggggcggctggtggttctgggacccggtggaaaatgcctcgttgttgccgtggcttgccgccagcgcgttgctgcacagtctgtatgtcagccgccagcgcgggagcttccgccactggtcgttgctgctggcgatactgacgctgatcctctcgttgctgggaacgctgattgtgcgttccggcattctgctctccgtccatgcttttgcgctggataacgtgcgcgcggtgccgctgtttatcctttttgccgcgttaagtctggcatcgcttgctctgtacggctggcgggcacgggagccgtatccggcgacgcgtttgggcggcggaaagtgcgaaacgctcattctgacgacgctgctgctctttagcgccgtcttgttgatcgtgctggtcgggacgctctaccccatgatttatggtttgatgggctggggaaggctttcggtgggcgcgccctattttaatcgcgtcacgctgccgtttggcctgctgatgctggtagttatcgtgctggcgacaatcagaagccgcaaagtctctgtgcgttgtcagcttccggcattgctggcgcatacgggcgtatttatcttcgccgccgggatcatggtttccagcggcagtcggcatgaaatcagccttaacctcagccccggtcagcaggtggtactggcgggctatacctttcgtttcgagcgtctggatctggaagccaaaggcaactacaccagtgaaaaagcgcggatcacgttgtggcggaatgaaaaacgcattggcagcctgcagcctgaaaggcgcttctatgccgcgcgtcgtcaacagatgatggagccggggattcactggaacctgctacatgactggtacgcggtgatgggcgaaaaaaccggaccggatcgttacgccatgcgcttatacgtgcagaccggcgtgcgctggatctggggtgggggattgttgatggtgtgtggagcgctgctgagcggatggcgggggaggaagcatcctgagttattgcctgatggcgctgcgcttatcaggcctacgagtgaaaagcatggtaggccggataaggcgttcacgccgccatccggcaaaacgatgttacttttggctttactgatttttctgccttttgccacccatgcccaggtggtggacacatggacgtttgccaacccgcagcagcaggagaaagcgctgtctattgccagtcagctgcgctgtccgcagtgtcagaaccagaacttgctggaatccaatgcgcccgtggcggtcagtatgcgccatcaggtttacagcatggttgccgaaggtaaaagcgaagcggaaatcaccgcctggatgaccgaccgctatggtgatttcgtgcgctacaacccgccgctgaatgagcaaacgctgctgttgtgggcgctgccgtacctgctgttattgctggtgggcgtggtggcctggcgggtgagaaagcgtcagcacgcaggagagggggaacaatgagccagtctgaacactccactgcgccgttacgtcccatgcctgtaaagcgtctggcggctgcggcggtgttgatggtggctgcctgtgtcggcggctatctgttgacgccgaaatggcaggctgtgcgtagcgagcaacagcgtctggccgatccgctacgtgactttacgaacccgcaaacgccagaggcgcagctttccaggctgcaagaaaaaatccgcgccaatccgcaggatagcgagcaatgggcgcggctgggcgagtattatctctatcgcaatgcgtatgacaatgcgctgctggcatatcgtcaggcgttgcgtctgcgaggcgataacgcgcagcttttcgccgcgctggcaacggtgctgtattaccaggccgggcaacatatgacgcctgcgacgcgtgaaatgattaataaagcgttagcgctggatgcgacagaagtgaccgcgcagatgctgctggcggcggatgcgtttatgcaggcggattatgcgcaagccgtgtcgctgtggcaaaccttactggatgccaactcgccgcgagtgaaccgcgcgcagctggtagaggccattaatttggctaaattgttacaaaatcggcagaaataattttttcttttttgtgacttttgtcatgtgtgctgtttaaaaaaacggcgaatgagacacaagtaaaaattaattacctcagtgtattattcatttttgacgaagtaaaaaactttccataacaaatagttattcatcattaacgccataaactcgcgttattatgcataaaaacagccaaaagccctgttatgaaagggttgcgcaagacgctatgcaaatgatactgattatgcgcgttaaaaaactctacaaaccaacgcaacacaaatcataccctttcagtatgtattgctctcatgctttcggcggagagcaacgcttcatcgaggaagtctgttgttatgaaaaatttgaaagtcagcctggcctggcaaattttgctggctatggtgctgggcattctgttgggcagctatctgcattatcacagtgacagtcgtgaatggctgattgccaacctgctgtcgcctgctggcgatatctttatccatctgattaaaatgatcgtcgtgccgatcgtgatctcgactctgattgtcggcatcgccggcgttggcgatgcaaaacagctaggccgtatcggcgccaaaaccattctctattttgaactgatcactacggtggcgattatcctcggcattacgctggcgaatgtctttcagccaggctcaggcattgatatgtcgcaactggcgaccgtcgatatttcgaaataccagaacaccacggcggaagtacaaagtcatgcgcatgggctgatggggacgatactgtcgctggtgccgaccaatatcatcgcatcgatggccaaaggggatatgctgccaattatctttttctcggtcctgtttgggctggggttgtcgtccctgccggcaacgcaccgcgaaccgctggtgacggtatttcgttccatctctgaaaccatgtttaaagtcacccatatggtaatgcgctatgcgccagtgggcgtttttgcgctgatcgccgtcacggtggcgaattttggtttcgcgtcgctgtggccgctggcgaaactggtgctgctggtacactttgctattatcttctttgcgcttgtagtgctgggcatcgtggcgcgcctgtgcgggttaagtatctggattctgattcgcattctgaaagatgaattgattctggcgtactcgaccgccagctccgagagcgtactgccgcgcattatcgagaagatggaagcttacggcgcgccagcctctatcaccagtttcgtggtaccgaccggttactcatttaacctcgacggctccacgttataccagagcatcgccgccatttttatcgcgcagctatacggtatcgacctgtcgttgtggcaggaaattgtactggtgctgacgctgatggtgacgtcgaaagggattgccggcgtgcctggcgtttccttcgtggtgttactggcgacgctgggaagcgtgggcattccgctggaagggctggcgtttatcgctggtgtcgaccgtatcctcgacatggcgcgtactgcgctaaatgtggtggggaatgcgctggcggtgctggtgatcgccaagtgggaacacaagtttgaccgcaaaaaagcgctggcctacgagcgcgacgtgctgggcaaatttgataagaccgcccaataacggattgccggatggcgctttgcttatccggcctacagcgaaagagaatgtaggccggataaggcgttcacgctgccacccggcaacctactccgggttgcctgatggcgctacgcttatcaggcctacaacgactacgttcatcaggcaataaacatcagccattcgttagcgtttcgaactcttcgcaaccggtatcaaacccttccagacagcttagattcaaccagtgcaacgccttctgcttattcttttcaataaagcccggttcaccgtttaaaaacatcattcccgcccagtattctgaatagccggtacgggaaatggcggaactgcgtttgaaataccaggcggctttttcatcatcggcggcaatgcccacgccgttggcgtaaatcaggccaagcaacatttgcgcatccaccgcggagtcgttatccagatcttcagaggccttttgcagcagcgagatggcttttgggtagtccgggcgcccggcctgggtgttgaccaggatccgcgccagcgtaatttctcccgctttactgcccgcgttagccgccttttcagccagctttttcgcgtcgggataatccaggcttaccggattagtgattttgatttgcgccagtagcgcgcaggcgtcggcgtcgccactgtcggcggctttttgcgcccagtattcagctttgttcaaatcgccatagctcaaccaactgtcggccagaaaatattgtgcgcgtctgtcacctgcctctgctgcctgcaaatactggctacccggctcaggatctgcggcatgggcaaagaatgtcataaacaacatcaatgcaagaagtagtttcattttgagttttatttagggtacggaaaagacagtataaagagatcgtatggataaaaaaacagcctccgggcggaggctgttatagggaaaatgcctgatggcgatgctaatgcatctaatcaggcctacagtagacgcaggccgaataaagcattctgatgccgccatccggcagatcaacccattgcgctttcgcgcaggcgggttttcagcttgttgtactcatcaatcacatactgctcggcggctcgctgatcggcgatcggctcaacgcgtacggcgcagtatttgtactccggcgttttggtaatcgggctgaggttttcagtcaccagctcgttacaggcgccaatccaccactggtaggtcatgtaaatcgcccctttgttcgggcgatcgctgacctgcgcgcgggtgatgattttacctttgcgcgaatgaacccacaccagcgcttcatcttcaatgcccagacgcgcggcgtcggcggtattgatttgcgcatagcccggttcatcggccagcgcggccagcgccgcacagttaccggtcattgagcggcaggagtagtggccgacttcgcgcaccgtcgacagtaccatcgggtactcttcggtgagtttatcgataggcgctacccagtcgcaggtgaagaactgcgccagaccgttgggggtatcgaacttctctttaaagaggtacgaggttccctgatcggcatctgacgtgtcgcggcacggccactggatataccccagctcgcccattttctcgtaagtggcgccgtagaaatccgggcacagatgacgcaactcatcccagatctcctgggtgttgttgtagtgcatcggatagcccatccgggtggcgatttcactgataatctgccagtcggttttcaggtcccacttcggctcaacggctttaaagaagcgctggaagccacggtcagccgcagagaagacgccttcatgctcgccccatgaggtagagggtaaaatcacatccgccgccgacgcggttttggtcatgaagatatcctgcacgatgaccagttctagatcctcaaacgctttacgtactgcagagagttccgcatcggtttgcagcggatcttcacccataatgtacgccgcgcgcacttcgccatgcgccgcacggtgcggcagctcgctgatgcgatagccggtatgcgcaggcagactttctacgccccaggctttagcgaacttctcgcggttttccgggaacttaacgtactggtagcccggataagtatccggcagcgcgcccatatcgcacgcgccctgaacgttgttctggccgcgaaccgggttaacgcccgcgcttggcttgccgaggttgccggtcagcatcgcgaggctggtcagtgaacgcacggtttccacaccctgatagaactgggtgacgcccataccccacaagatcgctgcgcttttcgcgctggcatacatccgcgccgcctgacgaatttcctgtgcgctcacgccagtgatctcttcgacggactccggcgtatagccttcgacaatcttactgtattcttcaaaaccttcggtacggctggcgacaaacgctttgtcgtacaggttttcttcaataatgacatgccccatggcgttgagcagcgcgatattcgagccgtttttcaacgcgatatgcatgtcagcaatgcgcgcggtttcaattttgcgcggatcgcagacgataattttcgccccgttgcgtttagcgttaatcacatgattcgccacgatagggtgggaatccgccgggttatacccgaagacgaacactaaatcagtgttatcaatttcattgatagcattactcattgcgccgttaccgaccgattggtgcagacctgcaaccgatgggccgtgtcagacgcgagcgcagcagtcaacgttattggtaccaataacggcgcgtgcgaatttttgcattacatagttggtttcatttccggtaccgcgagaggagccggttgtctggattgcatccggaccgtacttcgctttgatggcgctcaaacgttcagcgacgtaattgagcgcttcatcccaggaaacagattccagtttgccgccacgctggcgacggatcattggggttttcaggcgcggggtcaggatctgggtatcattaataaaatcccagccgtagtagcccttcagacacagggtaccctggttggttttcccctgcgccgcctcagcccggacgattttgccgttatcgaccaccagattgattttgcaacctgatgcgcaatacgggcaaaccgtgacgacttttttcatcggtttcgctccagttaatcaaatcgcgcatacgcgctgtcgccctcagtatgcatgttttatgccacttttttagtatgggctttccctgatattacgggcgaattttgctcaaaaccctgacgaaaaacaggctatcgtcagttttgacgtgtcgaaagaaaatgccgcatgacatttattatggggagaaacgcggagcgcaggccagataaggcggagccgctatccggcaatctgctctgcctgaagtggaaattatccggatggatagactcaaggccagggaacgctttgagactaacgccaggatagaacaggccgcggcaggcagttccataccgcggcccggcttcagaggaggctgaaaaggattatcgcggcaaaaatagcagcaataacgagatatttcagcgcgtaatagagagtgcggtttttctttttcagacgttgcccggcatcgcgtgctgcgtgaacgtatttaaagatgcgattaatcgcaccggtgcgatcgttctcgtcgtttggcgaactggcggcggacatcaacgatgcgccgacccagtggtttacgctctgcgcccagcgccatttcattgggcgctcaatatcgcaaaagaggataatacgcgtctgctcagttttattttccgcccaatgaacgtaggtttcgtcgaagatgacggctttgccgtcgcgccagctatggcgctgtcgatcaacttcaataaaacagcggtcgtcattcggtgtgcttaatccaagatggtaacgtactgaaccggcataggggtcgcgatgttttcccagataggccccgggaggcaactcggcgaacatcgccgctttaatagaggggatgctgttgaccagctttgtcgttatcgggcataacgtttccgccgacgggtgggcatcggaataccatttaaggtaaaaccgtttccagccgcgcttgaaaaaggtattgaatccggcgtcgttattggcctgcgcggcttttatgtgatgctgaagctgtagtgcctcttcacgaatcacctgccagttttccgtcagcttctgcagctctggaaatgccgtggtatcaaagtacggctgctttgccggtaacgttgagaagcgagtcatgaacatattgatcggcgccataaacgtcgagtggtcaaagagctgacgggaaagtttttgtttttccaccccgcgtgaatgcgcataaatgacgctgataataaaaataccgataatgattgctgcgaacataacgtcactgtccttctaagaaaacctcatcccgggattttcaggcaaccctcccggtgatgccaaagagaaaagtgtagttcgttgacaataaatttacatttctacaacttaaaagggccatttttgctaaagaagcgagtcagcccgtttaacctttatccaggcttgtcgacagtagaattgagatgactccgctacttcacccggtgatggctgattacgttatgccttatctcccgatgacggctgccagatcacaatgctttcgtaaaccgaaaatgactttgcttgtaaccttcgcgaagataaaaacggtgtgcatcgcggcgtttaatatttgtggaaagctccgttagctcggcgcccgcctgacgtgcttcttcttctgcccaggccagaagctgactgccaattttttgtccccgcatcggcggtaataccaccagctcctgaatttcgccaatccagttggcatgatggagatgaaactgcatatgcaggctgatcatgccgaccacctctccgttgcgcagcgctaaacgataatgaacgttggggtccagtaaattagcggcgaatccatccctgaaagcctgataatcaagctcatttttaagtaactcacagataagcgcgtaaacagaatcggtatcctctgttgtcgcgtggcgtaattcacagactggcataacgtcctcccgacgcctcatcaggatcaaccatctttcgccagactgtagcaaactaccgtcattatttattctatgacagttaaacggcggataacgtgcagccaaagatcactctgatggcaagggggagggcgagcctcccggggagttaggtggcaggctgatgtttaaccacgttaatcatccacggcacaccgaaacgatcgctgaccttgccgaaaccctgcgcccagaaggtctcctgccagtccatttcgatttgcccttgtgcggcaaggttatcaaaccagcgcttcccttctgctacatcctgggtatcaagcaccagcgtaaagccggaataatgcgcccttcccgacgcgctggcatcactcatcatgatatcgctgccggcaatgcgcatgttggcgtgggcgatagctgtatcgggaaagcgcattcctgacgggcaaccctcttcgttatccgccgccgaggggggcatttcaccgaagctgagtttataaagcagttctgcgcctaacgtttgttgataatacgcgatggcgtcggcacagttgccggcaaaagagagatagggacttaacggcatgatggttacctcaggtaagagatgctcgttaagtgtagttcgaaattggcacaatattgtcggtggcagggccgctcaggcccggtaagcaaggcgctaccgggcaatgacacggtaaatcagttctttttcacgaactcggatttcagtttcatcgggccaaaaccatcgattttgcagtcgatgttatggtcgccttcaaccagacgaatgttcttcactttggtgccgattttcagcatggaagagctaccttttactttcagatctttcacgatggtgacgctatcgccgtccgccagcaggttgccgttggcgtctttgacaatcagctcatcgctctcctgagcgggttccgcatcgttccattcgtgagcgcattccgggcagatgaacatgccgttatcttcgtaggtatattcggagttacattgcgggcagtggggtaatgacatgttggtatcctcaaaaagtcagcgggggcaaacgcgcccaaaaatggcagatcgccgaaaaaggccgcaattatacacaaaatccttagcgttgtcgggactattgccgcttttataaaagggtctgcgccacgccagtcagcaatggtttacactcgaataaccgcttttttactgtcaccacagcgcattagggcgtccttatttacaccttttgaccgaattgacatatatgtgtgaagttgatcacatatttaaaccctgttagggtaaaaaggtcattaactgcccattcaggcgtcaacaggttcggttgtacagtccgtaaccggacagtgtaagtaaacctgctacgcttgtatgagggatagcgttcgcgcccctccctccgctcgacggcgacgctggcgcggtatgccagtgcccgccgtatatagcgctacagggcttagcctatgaggacagctatgctgaaaaggaaaaaaataaaaccgattacactgggcgatgtgaccatcattgatgatggtaaacttcgcaaagcgattaccgccgcctcgctgggcaacgcgatggagtggtttgattttggtgtttatggatttgttgcctacgcgttgggtaaagtctttttccccggcgccgatcccagcgtccagatgattgccgcgctggccacgttttccgttcccttcctgattcgtccgctcggcgggttattctttggtatgctcggcgataaatacgggcgccagaagatcctggcgatcacgattgtgattatgtcgatcagtaccttctgtatcgggttaatcccctcttacgcgacgatcggtatctgggcgccaatactgttgttgctgtgtaaaatggcgcagggcttctcggttggcggggaatataccggcgcgtcgatctttgtcgcggaatattcgccggatcgtaaacgcggatttatgggaagctggctggattttggttctatcgccggattcgtgctgggcgcgggcgtggtggtcttgatctcgacgattgtcggcgaggagaatttccttgagtggggctggcgtattccgttctttatcgccctgccattggggattattggtctctacttacgccatgcgctggaggagacgccagcgtttcagcagcacgtggataaactggagcagggcgaccgcgaagggttgcaggatgggccgaaagtctcctttaaagagattgccaccaaacactggcgtagcctgttgtcatgtatcggtctggtgattgccaccaacgtgacctactacatgctgctcacctacatgccgagctacctgtcgcataacctgcactattctgaagatcacggcgtgttgattatcatcgccattatgatcgggatgctgtttgtgcagccggtgatggggctgctgagcgaccgtttcggtcgacgtccatttgtgattatgggcagcattgcgctgttcgcgctggcgatcccggccttcatcctgattaacagtaacgttattggcctgatttttgcaggtttgttgatgctggcggtgattctgaactgctttaccggggtgatggcctcgacattgccggcgatgtttccgacgcatattcgttatagcgcgctggcggcggcttttaatatctctgtattgattgccggtctgacgccaacgctggcggcctggctggtggaaagctcgcaggatctgatgatgccggcgtattatttgatggtcatcgcggtgataggcttgattaccggtatttccatgaaagagacggccaatcgtccgttaaaaggcgcaacgccagcggcgtcggacatccaggaagcgaaggaaattctgggcgagcattacgataatattgagcagaaaatcgacgacatcgatcaggaaattgcggagctgcaggtcaaacgttcgcgtctggtacagcaacatccgcgtatcgatgaataaatttcgcgcttaaggttcgcttaatctctcgcgggcatactctcctccatacctttggaggagagcgtcatgaaaagctatatttataaaagtttgacgaccctgtgtagtgtgctgattgtcagcagttttatctatgtgtgggtcacgacgtattaaacgcctgttatgcctttttcaacagcacccaggcacgggtgcctgttctttccgtacggttttgcaggaaaaactgtccctgatgtagttgggtgatgcggctgacgatactcagccccaggccaattccgccataacggctgtccatccgcacgaacgcttcgcttagcttcccgcatttgctttcatcaatacccggcccctcgtcttcgaccgccataatagcgtcggggtcggcgctaatgtggatagtgatatgggttccttcagggctatagcgatgcgcgttttccaccagatttcgcaacagcatacgcagtaacgtcgcatcaccgcgcaccaccacgtccgccgcgctttccggcagcaacagagtttgctggcgcgtttccagcatggtgttcagctcatcgtaggaggggaggatcacatcttccagcagttttacttcctgataattcccggaagagaatgactggcccacgcgcgccagttgcagaagctgggagacgctatccatcatctggtcaagacgggcgataagcggcgcgacatcaacattgtgggtttttgacaataattccaggtgcaaacgcacccccgacagcggcgtgcgtagctcatgggccacatcggcggtaaaaaggcgttcattgtcgagcgtggtggtcaaacgcgtaaccagttgattgatcgccgagacgacggactcaatctcaagcgtggagctgtgaatggcgatcggcgccagattatccgccgtccgcgcttccagctctttttgcagttcggcgagcggacgggtaatacgccgtaccgcctggtaacaaattagcagcgtcaggctaaccataaatacgccggggacgatcaggctggcgaccgcctcgcgaatttcgtgcatgatatggcgatcgttgttgcgattatcccgcagcgcctgctcgaacaattggatttgctcagtgctttcatgccataaccagaaggtactgattaactggaacaccagcagaataagaccaattgtcagcattaaacgctggcgaagggtcatcgctcttcgctgaaaacgcatcaggctcacttagctttcctcagtggcaaccagcatgtagccaaacccgcgaaccgtgcgaatgcgcgacttgccgactttgtcgcgcaaattatgtatatgcacttccagagtgttggtcgagggttcgttatcccagttgtagatatcgttataaagaatttcccggtgcaccggactgcctgccttgagcatcaaccgtgagagcaacgcgtactccttaggcgtcagggtcagttcctgtccatccctccatgcctgatggcggcctatattgagcgtcagattgccaaccgtcagttcactttcaccctggttattatggcggcgcagcagcgcgcggatgcgggcgtgcagctcctccagggcgaagggtttaaccagataatcatctgcgccgacatccagcccggtaatgcggtcattgagcgtatcgcgggcggtcagaatgagtaccggcagggtatattttttctgtcggattcgcgtcaggaaatgcaggccatcctcatcgggcagccctaaatccagcaccatcagactgtaatgaccagactccagactatgctcggcggcacgcgctgtcgaaacgccatcacacgcatagccttcggtttgcgcggcgagtattaacccctgtaataatagcgtgtcgtcttcaacaatcagtatcttcattcgcttagtctcctgcacggttgcagaatatcatctgcggcctggtaatacgtcgtttgtacgccggttaatcccagcatggttgagaaaagattgtcctgtgaataatccagcgtgctcgcccgtttttgcaggcaggcctgatccacctgataacgctgttgataatctttagaaagccaaatgagcatcgggacatgtttttgcgtatccggcgcaatggaatacggcaaaccgtgtaaataaacgccattttcacccaatgattcgccgtgatcggaaagatagaccaggctggtggtgaatttatcctgatgagatttcagcaggttaatggctttatctacaatatagtccacgtacagcacggtattatcataggtgttgatcaactgctcttgggaacagttctgaatttcgttagtgtcacaggttggggtaaattttttaaactgcggtggataacggttgtaataggttgggccgtggctgccgatggtatgtaatacaataacgccatcgcctttcaaatggtcgatatagtcttccagaccgtgaaataacacttcatcgtagcactcgccgtcgatacattgtccgggcaggtttagctcggtgacattttgatgcggaacgcgatcgcatgcgcctttacagccgccgtcattatcattccacagtacgttaatccccgcgcgctggataatatccagcagcccttcctggtgatgcgccagctcttcgtcataatgtttgcgcggcatatcagaaaacatgcagggaacggagatcgcggtcgccgtaccgcaagaggtggtatgcgggaagtagatcacatcgtctttcgccagccgcggattggtgtcgcgcggatagccgccaagagagaaatcatcgccgcgcgaggtttcgccaacgatgagaatcgtcaggtttttgcgatcgcctttcagcattaatggattgcgatgggcatcctcgccaatgcgtaccagcggcaaattcgccagccgttgatgtgaataccatgaccaactggcgacaatactgttcgatgggcttaatgctttgatcaactgtttattatttcgaaataacgaggcgtaatctttatagaaaaaggcggcgaccagaataactaataaaatagagatcaggacgctggccaggcggtaaagcccgctacgtaagcgcggcgtcgccggacggattttgacccagaaggcaatcacggctgccagaacgccgcttaatcccagcgtcagcaccatttgcggcgtcatcagcgcaaaggtttccgcgggcgtggtatccatcatattggcgatcatggagcgatcgatgatgatgccgtaagtcaaaataaaatactgcgcggcagcgccgaccagaataaaaacgcaggccagcagtcggtttagccaaataaatgaggccagcgtcagcacactattgaccacgctaaacgcgacgaccggcatggaaataaacaccagcacattgcgcagcgagtttaacggtaggtcttgtagtacctgcttgtagaacgcaatgttcaggcagacggcaatataaaaggaaaaaagcagaagccaggcgatttgcccaagaacaggtcttttaagaaagcgctttaacatgttgatgcgtccatcgattcggtgacgctaatcgtgacaaagtaaaattaagtgaaccttaagaacttaatgttggtggcggccggataacctgcgctatccggcctgttgcgataacattaactacacgtggtcaatcctgtttaaccggcgcatccagcggatacgggtttttgtgaatgcggttgtagttcaacgcatacagcgcggtgatcaccatcaacgtgacgaacgaccacatcacttctttggcgccggaaccgatgaccgcccagatgcaatacacaaacgcgacgaaggtaatcagcagatacagcgggcgcgctttaccaaagtgaccgtggcccaacagtaacagcgcggcacaggtgtaaagataaggcaccagggtgaagataaccgacacggaggagaccagaccaaactctttcgcggcgttcggcgacatactgctgaactggaagatagtcatcagcacgccgacgataagcaacccagccactggcgtaccggctttattaacccgtgcgaagattggcgggaagagaccatcgtccgccgccgcttttgcggtttgaccggcaagcagcgtccagccgccgagagagcccaggcaacctgctgccgcacagaaggaaacaatagcccctgcggtatcgcccagcgccatacgcgccgcgtcaccgaaaggcgatgccgacacgcgcagcgccgcgttggggatcatccccataatcgccgttgtggagagcacatagcagacggcggcgatcagtaccccgccgatggtggcgataggcacattgcgtttcgggtttttgaccacaccggccgcaacggaggcactttctaccccgatgaatgaccacagcgtaacgttcaacgtgctttgaatcgcgccgaaggtattcatgccgctcacgttccaggccgccatataggtttcgcctttaaaccagaaccagccgaagaccgcaatccctacgataggcaccagcgccagtacggtggcgacggcctgtacgcgggtaatcattttcggcccgacgatgttcagcagcacaaaaatccacagcaccgcgacgcaggtaagcgttaataccagtggatctttcagaattgggaagaaatagctcagatagccgacgccgataacgaccatcgcgatattaccgatccagcatgccagccagtacagcacgttcgtttgatagcccaaaaacggcccgaagcagcggcgtgcgtaggcataggaaccgccgggactgggatctaaggacgacattttggcataaaccatcgacagcgccagggcgccgatgatagtgaccagccatccgtagattgcaatcccgccagtggccgccaggttagcagggagtaagaatacccctgaacccataatattccccgataccattaaggtgacggggattaggcccactttgtgagcatcagcatccgaagacataatttggactcctgaaaaggtgacttcgttacgataaattacgtcgtatcataccccctcagaatgccgctgaattatgtcggagacgggttatcgccaatgctgctattatcgtgtcttatcgttgagtgtagaaaaattaggcagccgatcgttcccgatgttggctaacataatgcaggggggtcataccataaaactctttaaacacggaaataaagtacgatgtgctgttatacccacacagctgtgagacttgagagatattctttccgtccattaataattggtttacggcataacgcattcggcaggtcgtgattatttggctataactggtattctcgtttttgagctttttctttaacaagcttggactcaggcacaggcaactggcaacggcgctcagattccagtctttatgaatatcgctctgaatgatgtggtaaacgctgtcactgatgcggctgcgcagcatgtgcattaacaaagaaataaattttttgtggtcaagaaagcgggataaaacggtgaaaaggagcgcacgggtacgttcactaacaatttcatccggtgcttccatcgcgctgtagcgggcggcgaccctgaagatatccggcgtcagacagttggcggtcaataagggatcggcgttgcgttgccagacgggaaggtgtgagagatctttattcaggaattgtaaatagtctttaatattattgcgactcacttgtattactagcacgctatttaatgatgaaatgtcaataacgttattttcacaagccagaatggccatatgattcgcttttaagctgattggctccttaccatttactcgtaaccatgtatctttttcggttaataacactatgcaaggttcgttgctgcaaatcctcatacccgaactcctggaatatgaacataaaagaccggatctcgccaaacgggagagataacggggactgagtcaattgtgtgatgaattgaaactgcactaaaataactttcctgaataatattacaatatttgtacgatgaattagggtgtacaaaaagttgtacgcgagtggaaacttgtcatttttgtataaaaaaagcgcgggatggggcccgcgcaaaaaggtatgacagtattattgttttgcagcaatactcagggaatacatgccatcctcaaaaaaaagactctttgtgattaggctttcacgcacataacgtgatatacgccatcaataatttccgtgccttcggtttcatgctcaaagccagggaagtgatgatcccaggattgcagtgagcgtaagtaacccacctgcggactgttttcatcgccaaagttttcgccggagagcagcatcgggatgcctggcgggtaaggaataacggagttcgccgcaatgcgacccggtagattttcaatcgccaccatttcaatattgttgttcacaatcgcgttgtaggcgtcgcgcggggtaatctccgcaaccggcagggtggaataggcggcgttgagacgggcgcccgggttattttcacgtagccaggcaaacattttatcgcccaggtcatgaatacccatgttcgcgtaagtgtcaggataatcctgcaccagttccggcatcacctgcgccagcggcgtattcgcgtcgtaatgatgtttgaaggagcacagcgtgttgatcagcgttccccatttcccgcgagttacccccatagagaacaggaacataatctgaaagtcggtggtgcgggtcggcacgataccgtggcggccaagccatgctgtgaccagcgcagcaggtacgccggatgcttccagttcgccatcgtcgcccatacccggcgccaggatactgactttaatcgggtccagcatactccagttatccggcaggtctttaaagccgtgccaggtttccccggggcgcatgacccagcagttctggtcagtggctagcagttttgccggcgcgtcggcgaagtcatacgttttaccggtttgtggatcggtgacgacgtccttattccacggtttaaagaaccagtcgccttcatcggtaaactctttataaagacgcgccatcgcctgacggaaatcaaccgcttcgtcaatcacctcttgagtcagggacaggccgctgttaccgtccatcatcgataccgccacatcgttggatgcgcagatggcatataacggagaggtggtggcatgcatcatataggcctggttgaagcgggagaaattcaccgcgccacggccttcacggacgtgaatgtaggaagcttgtgaaagcgcattcagtagtttgtgcgtggagtgggtggcaaacacggtcggaccgttatggtcgcctggctcgccgcgcatcgcgtagtgatcgcaataaatcgggttgaagcgcgcatagccgtaccatgcttcgtcgaagtgaatgcgatcgctggtttttgccagcagatcctgcgcctctttggcgttatagcatacgccgtcataggtacagttggtcactacgctgtaagacggtttctgtccggctttagttttggtcagcgggctggcgctgatttttttctgcaaggtttcaggctgcatttcctgcgggtagattggcccaataatgccgtaacggttacggcttggcaccatatataccggtttggccccagtgaggatcagcccctgctcgatggatttatggcagttacgatccagtacaacgacatcattatccgtcatacaggcctgcataatagtacggttagaacctgaggtcccgacaactacggaccaggagcggtcagcaccgaatacgcgggcggcgtttttctcgctttcgccaaacgcgccggtatggtcgaggagtgaaccgagcgtggtacgctcaatccccatatcgctgcggaacaggttttcgccataataatcgtgataaaagcgaccggcaggcgttttagtgaaaccgacgccgccctggtgtcccggcgccgcccatgaatattcatgaatgtcgctgtatttcatcaacgcgttaaacagcggcggtaacagttgctggcgataccgggtcatggcggcaacggcgcgtccggcgataaagtcagcggtgtcttccagaatccaggcgaattcatcgacaagctccagcaggtcgcggtccagcgatgccgtcgctttttccctgtcgcctaacaggaaaacgggcacgttttgctgacgctcgtgaagcttaccgatcaattgcctgacgctcaggtgctcatccggttgttccatttggtagctaaacatcagacagtcaatggcttcgttcgcggacaagatggcatagccgtcatcgaaggatgtcgatttaatgacggtaacattttgttggctcaaggcatctgccagacgctcaaccgcgttgccaacccaggtgtcctgatgcagaaactcactttcaacaattaatactttcatcatcttttacccggttgtggaggccgtgcaatttacgccttgccgacccgccgtatgaatgtgacgtgggcaagtattaccccgtcaaatagggggtgtaaagtgatggaataatggtcggttattgatattattgtttaataaacaatgggttaattattgatattgagcgatttcacctgccgtttatcgacaggtgaattatttttttggctgatagtggtatccggctttagccgggcatcgtctggcgtcgttgctgacttagcttgcggtattgttgcggcgacataccgacaaatttgctaaaagtactgtaaaaacggctgctggatcggaacccggcagtcagagcgacatcgaggatcgttttgtcagtatcgctcaataaggcacgtacgtgattgatgcgcatcgccgtgatgtactgcttcatcgtcaattgcataacccgctggaatattcccatcgcgtaattagcattgagtttgacatgctccgcgacgtcgttaatggtgagcgcctgatcgtagttatcggcaataaatcccagcatctggcttacgtaaaactgcgcatggcgtgagacgctattcttgtgggtgcgtgatgttttattgagcaaaatgggttgccagccggaaaggctaaagcgtttaagcatcaggccgatttcatcgatcgccaactggcgaatttgctcattcgggctgcttgtttcctgctgccagcgcaacacttcaaaggtgctaagctgctgggtcgccagtgatttaaccaccatcccgtgcgtgacgtggttgataagatcgcgatccagcggccaggagagaaacaggtgcatcggcaaactgaaaatcgccatctggcggcagttgccggggcgggtaagctggtgtggcgtacaggcccaaaacagggtgatatgcccctgctttatctgcacgacttcattgttgattaaatactccacatcgccgtcaaacggaacattcacttctacttgcccatgccagtgactgctggccattctgtgcggcggcctcagttcaacgtccagtcgttgatattcggaatagagcgacagcgggctacgggtttgcttttcatcgccgttgcacatgtgcgggtcgggcgggaggagggatattgcttgcgtactcatcgtcactccatttcctgaattatcagaattatgcccctttagccgggaggaaaccgggaatccggacacagaatccgtcgatattgtagagcgtagcctgactatcaggccgaatactctgctttttacgccattttgtcccaaaaactcagatctcccgcgcgccagcatacgatctgagttttcgggaatgctcatcggggaagacggaggttttcaccgggaacgcgtgccaccatgaaggtgttcactactgttctggagagtcatgatgacggcacccaaaattacctttatcggcgcaggttctacgattttcgtcaaaaatatcctcggcgatgtgtttcaccgcgaggcgctaaagtcagcgcatgtcgccctgatggatattgacgaaacccggctggaagagtcgcacattgtggtacggaaactgatggactcagcgggcgcttctggccggattacctgccataccaaccagaaagcggcgctacaggatgcggatttcgtggtggtcgcctttcagattggcggctatgaaccctgcaccgtgaccgattttgaggtttgtaagcgtcatggcctggaacagacgatcgccgatacgctggggccgggcggcatcatgcgcgcgctgcggaccatcccgcatctgtggcggatttgcgaagacatgacggaagtctgtccgaaggccaccatgctcaattacgtcaacccgatggcgatgaatacctgggcgatgtatgcccgttatccgcatatcaaacaggtcggcctgtgccattcggtacagggaacggcggaagaactggcgcgcgacctgaatatcgatcccacctcgctgcgctaccgctgcgccggcattaaccacatggcgttttacctcgaactggagcgcaaaacggctgacgggacttatgtcaatctctatcctgaattgctggcggcctatgacgccggacaggcgccgaagcccaatattcacggcaatgaacgctgccagaacatcgtgcgctatgagatgttcaaaaagttgggctacttcgtcactgagtcatcagagcattttgccgagtacacgccgtggtttattaaaccgggacgcgaggatctgattgcgcgctacaaggtgccgctggatgaatatccgaaacgctgcgtagaacaactggcgaactggcataaagagctggaggagtataaaaccgccgagcgtatcgacatcaaaccgtcccgcgagtacgccagcaccattatgaacgctctgtggaccggcgagccgagcgtgatttacggcaatgtgcgtaacgaggggctgattgataacctgccgcagggaagctgcgtggaagtggcttgtctggtggatgccaacggcattcaaccgacgaaggtggggacgatcccttcccatctggcggcgatgatgcagaccaacatcaacgtgcaaacgctgttgaccgaagccatcctcacggaaaaccgcgatcgcgtgtatcacgcggcgatgatggaccctcataccgcagcggtgctgggtatcgaagaaatctatgcgttggttgacgatctgatcgccgcgcatggcgactggcttccggcctggttacgccgttaatctccagccgcgctggacggcagatccggcgtttaacctctactaacagaaggcgggcgctggtaacagcgacccggtaccctatgagcatctctctgacaacaaagctgagttacgggttcggtgcgtttggtaaggatttcgccatcggcattgtgtatatgtacctgatgtattactacaccgatgtggtgggactttcggtcggcctcgtcggcaccctctttctggtcgcgcgaatctgggatgcgataaacgatcccatcatgggctggattgtcaacgccacgcgttcgcggtgggggaaatttaagccgtggatattgatcggcaccttaaccaattcgctggtgcttttcctgctgttcagcgcccatctttttgagggaaccgcgcaggttgtatttgtctgcgtaacctacatcctgtggggcatgacgtataccattatggatatcccattttggtcgctggtaccgactattacgcttgataagcgagaacgcgaacaactggtgccgttcccgcgtttcttcgccagtctggctggcttcgtcactgccggtataacgctgccgtttgtgagctatgttggcggggcggatcgtgggttcggctttcagatgtttacgctggtactgattgcgttctttatcgcctcgactatcgtgacattacgcaacgtacatgaggtgtactcctccgacaacggtgtaacggcaggccgcccacatctgacgttaaaaacgatcgttggattgatatacaaaaacgatcagctctcttgcctgttgggaatggcgctggcgtataacattgcctccaatattatcaatggctttgcgatctactacttcacctatgtgattggcgatgccgatctttttccctattacctttcttacgccggcgcggcgaatctgctgacgctgattgtcttcccccggctggtgaaaatgttatcgcggcggatattgtgggcgggcgcctccgtgatgcccgttctgagttgcgcagggctcttcgcgatggcgttggcggatatccataatgccgctttaatcgtggcggcgggtattttcctgaatatcgggaccgcgctcttttgggtgcttcaggtgatcatggtggcggatacggtcgattatggggaatttaagctcaatattcgctgcgagagtatcgcttattccgtacagacgatggttgtgaagggcggctcggcgtttgcggcgttctttatcgctctggtgctggggctgattggctacacgccgaacgtggcgcagtctgcgcaaaccctgcaggggatgcagtttattatgattgtcctgccggtactgtttttcatgatgacgttggttctctacttccgctactaccgtttgaacggcgatatgctgcgcaagattcagatccacctgctggataaataccggaaaacgccgccattcgtcgaacagccggatagcccggcgatttctgtggtagcgaccagcgatgtaaaagcgtgagcatggtctctcgtgcaggccggataagccggataagcgtagcgccatccggcaattaaccgataacgcggcccgggagaacgccgggcctgccaggttatttcgcgcagttagcgcactgtttgctgacaatctgctggaagaaatcgttgcctttgtcatccaccaggataaaggccgggaaatcttctacttcaattttccagatagcttccatgccgagttccggatactcgacgcactccagatgcttaatgctctgctgtgccagtaccgccgccgggccgccgatactgcccaaataaaagccgccatgttttttacaggcatccgtgacctgctgactacggttgcctttcgccagcatgatcatactgccgccgtgggattgcagcagatcgacataagagtccattcggcctgcggtggtggggcctaatgagccagatggataacctgccggggtttttgccggacctgcgtaatagatgggatggtctttaatatactgcggcaggtcttcgccggattcaatacgctcttttagcttcgcgtgggcgatatcgcgacctacgataatggtgcccgtcagcgacagacgagtcgagaccgggtactgcgatagctgggcgaggatctctttcatcggacggttgagatcgactttcaccgcgtcgccttcgcccgcctgacgcagcgctggcggaatatactggcccggattgtgttccagtttttcgatccagatgccttcgcggttgattttcgctttgatgttacggtcggccgagcaggagacgcccatccccaccggacaggaagcgccgtgacgcggcaggcgaattacgcgaatatcgtgggcgaaatatttcccgccgaactgggcgccgaggccaagtttttgcgcttcttccaacagttcctgttccaggtggggatcgcggaatgcctggccgtgctcgttaccttccgccggcagcgcgtcgtaatagtgggtgctggcgagcttaacggttttcagcgtgctttccgccgaggtgccgccaatgacaaaggcgatatggtatggcggacaggccgcggtgcccagcgtgcgcattttctcaacgaggaagtttttcagcttgcctggggtgagcagcgctttggtctcctgatagagatacgttttgtttgctgaaccgccgcctttcgccacgcaaaggaacttgtactcgtcgccatcgacggcatagagatcgatttgcgctggcaggttgctgccggtattgacctctttgtacatattcagcggcgcgttctgcgagtagcgcaggttatcttcgatataggtattaaacacgcctttggagagcgcggcttcatcaccgccgcccgtccagacgcgttggccttttttacccatgataatcgccgtgccggtatcctggcaggtcggcagaatgcctttggcggcgatctcggagtttctcaggaattgcaacgccacatatttgtcgttttcgctggcttcggggtcatggagaatggcggcgacttgctgctggtgttcaggacggagcataaaagacgcatcatggaaggcctgttgagccagcaacgttaacgcctgcggctcaacgttgaggatagattctccattgaattcactgacgctgacataatcggaggtgagcagataatactctgttttgtcctctcccatcgggaaaggcgcctgatagataaactcttttttcgacatgtgcttccagcctaatagtaagaaaatgtattaagaacctcatgggccaggctctaagtcgcgcgccgcgcataaccgggcggcgcgcgcggccattacaggaatccgtacattgcggcaaagatccagccaaagacgcaggagacgctcacgccaatcaaacccggcagaatgaagctgtggttaatgacgaagcggccaatacgggttgtgccggaacggtcaaactgaatcgccgccagatcgcttgggtaggtcggcaggatatagtagccataacatgccggcgcagaggccacgatatacgccggatcgacaccgatagccagcgcgacgggaacaatcgccgccagcgccgctgcctgggagttaacaaacttggagaccagcagcagaacgatggcgtaggcccacggatactctttgaccatttcgcccagcacgccctgaatttccgacatatgcgcgccgaacatggtttccgccatccaggcgatcccgtataccgcgacaatcgcaatcataccggaacgaaaaacttcgttttttgagatagacgcaggattggttttggtcaggatgataatgagcgccccggtcagcagcataaacatctgaatgaccagcaccatcgacaacggtttgccgccgaaggttggacgtaagtcggagtccgcgcccaggagagcgaccacggcaatcgccgccaggaagatccacatcgccagccagttgcttttcggcagttttttatccagcagcgtcgcggtatcgccgtacacgtactgacggttttccggtacggaaataaatttctgaaacgcttcgtctttatccagatctttaccgcggaaccaactaaaaataccgattgccaggataccgagcagggtagacgggatggtgatcgacagcagatcgaggaactccagatgttttccgtcaaatgtcacgttgcccagcatcgctaccagagaaaccacggcgacggaaaccggactggcgatgatgcccatttgcgcgccgatagaactggccgccattggacgttccggacggatattattcttgatcgccacgtcatagataatcggcaaaatggtgtagaccacgtggcctgtcccacacagaatcgtcagggtacaggtgacgaacggcgccacaatagagacgtatttggggttgcgacgcagcagcttttcggcaatctgcagcatcacatccagcccgcctgacgcctgcaacgtcgccgacgcggcgactaccgcgataatgaccagcattacgtcaacgggcggtttgcctggctggagatggaaaacaaacaccagaatgaccagaccgataccgcccaacaacccgagcgcgatcccgccctttcgggcaccataaaacagacatattaatattatgagaagctgtatactaaataacatttttatttatcctcgcgataaacccagtcaattttgataaatggatcacagccatcttctgatttttgtgaatgagcatcaggaaatggcgaatattcaatgcgccagtggcgacgattaacgattaagctttttacagagttgctttaagtaattattttcttgcgatggtgatgttcagaggggagtaccctctggcgatgggcaggtggagtcagcgagagcagtaaattatgatttgtctgttttaaaaacaggcgtttattatttgatttttgtgtctcgccatcaggtaaatcacgagataaatcgaacagcatgtgacttatgtgatcattgtcacgccatttttttaaattattagtatggcgtgtggagacgcgtatctgctcaccaatatacgtattgtccataggcgtagcacaagctccattgctacaaacataattttatttaagtgtcaggaaaattccggacaaatcccttttttaataaaaatacacactctcggcatgggataatacttaattaacttttgttagcgttttgaaattaaaaacagcgcagagcgctgtaataatagaaaataacgttaacaggcctggggtgagtatatttgatctgacacaatttcccaggtttgttattaatgtgatagcgtttttattggcattgttataataaatgttaccaggatataacgcttcgcgtcggctttatgcggtatccttactgacaatattgtttcagtaaagagtaatgttccggctgaacgcggtagcggtaaaccggcctgccggtcacgccgtaatgaatactggtaaacaagatatggcaatttaccagccagatgagatatttacggcaggagacgcgtgagatattcacttcgttggccaactcgtcggtagaaaattcctgctcctgatgcgcatcaatccactggcataaggtgcgtagcgtttgctgcgtcagcccttttggtagccgacgaggctcctgctcgctggatgaattaccgtgaatgagcaggtcaagctcagactgttcgtaatactggcgtttttccatcgccgttttcttacgtagccaaccggtcaacgcttcttcaaagcgcgtggcctgaaaaggcttgatcagataatccaccacgccgtagtgaagcgaatctttaatggtggcggcgtcagcggcagaagaaatgacaataacgtcgcttttgcagcctgcgctgtgcaggacaggcagcagatccaatccgttttcctgctgcatatagatatccagcaggattaggtcaatgtgattttcactgttgaagataaactctttcgctttttccagcgtcgaagcggttccacaacaatgaaaaccggagatttgcgcgacatagcggcgatttaactccgcgaccatcgcatcgtcatcgacaattaatacattgatcataggctggtcctttttccatcccagggtaactgtacaaaaaattgtgtgaagatcccaggctcggactccacggaaattacgccgccaagcgcttcaacctgctgtttaaccagcgctaaaccgacgccgcgttcggcgcctttcgacgagacgcctttttcaaaaatcgcctcgatgcgctcaggttcgatacccggaccgtcatcgctcacttcgcaatgcagccagccatgacggtagtgtaacgagacgctgatttcgccgccggattcctggctcaacgcttccagcgcgttttcaatcaaattacccagcgccgtaatcagcaccgtaacctgatcttcattgttattatccggtaactggctgtcgctgcttatcaccaggctgtgcccgaaatcagaggcgcgggtaatcttactgagcaaaaagccagcgataatcggcgactttattttacccagcagcaaaccgatctcttcctgatagttattggccgtcttgataatatacgcttcaagctgcttataactcttcaggtgcaataatcccagaatcacatgtaatttgttcatgaattcgtgggatcgttcacggagcgcatccgcgtagttcaccatcccgtccaaccgctgcatcagttggcgaacttctgttttatccctgaaggtggatatcgcgccgataatttcgccattgctgcgcaccggaacggtattcaccagcagcaggcggcctttgacgatgatctcttcatcgcggcgcggcgtaccgtcacgcaacacttcgctaatgtccaccacctgcgaccaggcatgactcagggtggataatctggcgtcatcctgcgtttttcgataatcgagcagcgcctgcgccgcatggttaatcaacgtgacttcgccgctatcatccacggcgataacgccctctttgattgactgcagcatcgcctggcgttgttcaaacagggttgagatctcatagggttcgaggccaaacaggatacgtttcagcaccttgaccagcgcatacgtgcctaataaccccaccagagcgccgaacagaatggaccagataatactgccgcggctattgttgatctgctgcgtaacgtgactgagttccaggccaatcgctaccacgccgatctgccggtggtgttcatcataaaccggtgtgaaaacgcgcagcgctttggcaagaaagccgcgattaatggcaacgttttcctttccctgcagcgcgagcagaatgtcatcgcctttgaacggttggccgattcgctgcgtttctgggtgcgaataacggatgccctgcatgttggtcaccacaataaacaaaaagccattatgctggctcaccgcttcggcgagcgtctgaatgccgctttccgcaggcggttttttcagcccctcgcgaactgccggagagtccgccagcgagcgagccaccgccagcgctttatctgccagcgcgtcgcgcgtcatgctgctgatttgcgaaaaatagatcagatggaccacaacgagcaccgaaaacaaaacggcgctgaccatcagaatgacggtagtgccgagtttcatggggcgtttgcgtaacgcccggcatggcagggagtgtttcatagtggacctgagcggacgaatcgtaaggttattatccctgatgaggcgtctaattcaaaggcataggcgatgttgctccagtgttgaaaagcccgtcttgccttgcagggcgcgctacctgctcatgtcgttaattaatatcgccggataccgtgatgggtaatttattttcatcagaattacataaaataatttttcattaatttttataataacgtatgcggtatcacattttatttttactgacgttcagaatgcgtttgatcacaatcaatcagcgctaatatttaatctattatgattagttttcattacatattattaataattatggaagcaatgtgagaaataaaaaatggaaataaaaaaatggctgaacacaaccataacccgacgtgatgctattgtcgctactgcaaaagtaggggcggcggtgacgctaagccaggcgattacgctgccttttgctaccactgcccaggcgcaggataccccgataccgaaggatgccaacggcgaaaccgtcaggcacagcgcctgtctggtcaactgtggcagtcgatgcccgcttaaggttatcgtgaaaaatgatcgcattgtgcgtattgagccggaagacgcgaaagatgacgcggtattcggcgagcatcagattcgtccctgcctgcgcgggcgttccagtcgctggcgggtctatagcccggatcgcattaagtatccgatgaaaagagtgggaaaacgcggcgaaggaaaatttaaacgtatttcatgggatgaggccacggcctttattgcggcggaattaacgcgtgttagcgaaaaatatggccgggaagctatttattataattatcaatccggcgcgtattatcacacgcagggtagacccgcctggataagattactaaatctcaccggcggttatttaaattatcacaacacctattccacggcgcaaatcgccaccgccacgccttatacccacggtgattatgtcggtagccattttacgcagatcgcgcattccgatctggtggtgctatttggcctgaatctctcagaaacgcggatgtccggcggcggccaggttgaagagctgcgccgggcgctggagacctcgaaagcccgggtcattattatcgatccgcgctataccgattcggtgattaccgaacacgccgaatggctaccgattcgcccaaccacggacgccgcgctagtcgccggcatagcgcatacgctgattaccgaacagcttctcgacgaggcgctggtaaaccgctattgcgtcggctatgaccgtagcaccttgccggacacggctgcgcctaacgccagctataaagattatgttcttggcacgggcgatgacggtatcgcgaaaaccccggaatgggcggcggatatcaccggtattccggcaacgcgtattcgccaactggcgcgcgaaatcgcctcggcgcgcgcctgctatatttgccagggctgggggccgcagcgtcatgccaacggcgaacaaaccgtgcgtgctattcagacgctgccagcgttaacaggccacttcgggcggcccggcaccaacaatggcaactggccttacggtacgccgtatggcgtgccattgttgcctgtcggtaagaatccgatcacaacctctattccttgctatctgtggacggacgccattcagcatccggagaaaatgaccgcgacgacaatgggtgtgaaaggcgcggacaggctaaaaaccggaattaagctgtttttcaaccaggccggtaatactttgcttaatcagcacggcgaaacaaaccgcacccgtcaaattctcgcggatgaatcgctgtgtgaaaccattatcgtgattgaaaaccatatgacgcccagcgcgatgtatgcggatctgctgttgccggagaccagctatcttgaggcggaagacctggtggacagctcctatgcggcgggatcgcataactacatgattgcgattcagaaaaccgttaaaccgatgtgggaagtgcgcagcacgtatgacatctgcgcggatatcgccgggcatcttggactgcgcgagcaatataccgagggccgaactcaggcgcagtgggcggagatgcactatcagcagatccgtgaaaaacgtccatacctaccggagtggagcgtggcgaaagagatgggtgtgattgaccagcgtatcgctaccgagcagcagagccttgcgtttgccgatttccgcgccgacgccgaggctaatccactctccacgccgtcgggcaaaattgaaatttactcccaggcgctggcggatctggcgcaaacgtggactttgccagaaggcgagcgaattcccgcattgccggaattttgtccggcgaaagagtcgcaccttaacaaagcattgacggcgaagtatccgttgcagttaagcggcttccataccaaagggcatacccactcgacctacagcaatgtgctgatgctgcatgaggcggtgccggatgaagtctggattaacccgattgacgccagcgctcgccaattgaagtccggcgatcgggtgcatgtattcaatgaccgcggcgtggtggagcttccctgtaaagtgacccagcgcattttacccggcgtggcggcgatgccgcagggcgcgtggacgcggcttgacggcaacggcgttgatgtcggcggctgtatcaatacgctgaccagccaccacccttcgccgctggcgaaaggcaatccgcagcataccaatctggttgaaattaaacgcgcttaaggagtgatgtacgatgaaacagtatggcttttatgttgactcctcgcgctgttcaggctgtaaaacctgccaggtaagctgcaaggataataaagatctggatgtcggtccgaaactgcgccgcgtctatgaatatggcggcggaagctgggtgaaagagggggaaagctggcatcacgacacctttacctactacctctctattgcttgtaaccattgcgatgagccggtatgtgtctccggctgtccgaccggggcgatgcataaacgcaaagaagatggtctggtcgtggtggatgacagcgtatgcgtcggctgtcgttattgtgaaatgcgctgcccctacggcgcgccgcagtttgatacgcaggcgaacgtgatgcgtaagtgcgacggttgtcttgaccgactggagaacaatctgcgccctatttgtgtggattcttgcccgcagcgagcgctggatttcggccctgtcgatgaattacgggcaaaatatggcacggagaatcaaatcgcgccgctaccttcggcgtcgttcacccatcctaacctcattattaaaccgcatccgaaagcgagacccacgggcgatacggaaggcgcaatcatgaacattcgggaggtgcgccatgcatgagttaccgctggtcttttttacggtctttacccagagcgcggtcggcgcgtttattctgctgctgattggcggcgcaatggggctggtcgcgccgcggcgtaaggctatcggtctgttctcggtgatgtgcctgtttgggctgggcgtcattgtcggcaccttccacgtcgggcaaccgctgcgtgcgctgaatatgctgctgcgcgtcggacattcgccgatgagtaacgagattgtcctgtcggcggcttttgcggcgctcggcgggctgggggcgctcggtttgttgctgaaccgggcgacgccgctgtgtaacgcgttggtctggttggcggcgatagtcggagtagtcttcttatacgccgttccgcagatttaccaactgccgacggtggcgacctggcgttcatcttacaccacggcaatgatgatattgacgccgttgattggcggcggcgcgttggcggcattgtttggcgtgcgccgtctggggctactggtcagcgtgttggcgattttggtgagcttttgtctgcgcccgggctatatggcgacgctgatgagcgccgatagcgctctgaccgccgcgcagcatagctggtttaccgcccaggcgatattgctggcggcgggcgtggtcggggtggtggtctgcgcgcgcctgaaatcgagcgctgcggtgctggccatgacggctgtggtggttatcgcggcggagttggcgggtaggattgcgttttacaatctgtggacgctgccaatgtagttttttgcccggtttatgccatgtaagcctgatcagcgtagcgtcatcaggcgaaatatttcaggagctattgctatgctttcccgtgctgttttgccgcgtatcctcggcgcactgttttactactcccctgagaggccggaggtgaaagcgttgttcgattgtttgccaacgttgcctgagctttacccctggcgcgatcgtggatctattgaatcactgtgtgcgtcatggtcgctaccggatgatgatgcgcttacatggcaattttccgtattgtttgaaggccagggaaagatgcccgtcccgccctggggatcggtctatctggaaaaagataatttgctgatgggggaaaccaccgccgattatcgagcttttttacagtcgcagggcatggtattcactgaccgtgaacgcgagccggaagatcagtttggcctgatgctattggcctgtagcgatctgctggcacgaggcgacaacgtggcggccaaccggttactggaggcgcatctgctgccctggggattccgctatctggaattgctgcaacgcaataccgttagcgccttctatgcccggcttgccgtcgtagcgacctgttatctgcaggatgttcagcagcaacagggactacagcctgagaataagcggttgtttttctgaggtattggtcgggttttgatggcgtgccgtaatacttgtgccgccatcgtgcccgctgttgcgtcagcgggcacagtttactattacagctccggcgtctttttgaaaccggtcagcatcagcaccaggctctgttttgagtccgctggcgtgaagtcgtagtgatttccctgacggtcgccgccgatataccaggatatttccgttttcccttccgccagcgctttgcgcaccgctttatcgacatcaaccatgcgatactcatgtgaatggtccagatataacacggcatcggaacggtagttgatcgccggtttattgttccaggacacggtactgacgtgccagtcactgctggtcgggtaaaagaaaatttgatcggcgccgttcgcttccgttttgccgccaaaaaggcgaatacggtatttgaatagcgaagcgtccatattggcaggcaggggcgggatcttaaatttcaccagcgtgagcgtttccgggtgctgcgtgcgtccgccatttgtccagtcatcctgtacgtacaaggtatcgacgctggcatgaggcttgtcgtcttcgctgcttacccaggtattttcttccgctttactgtaggcgtaaggaaccgtagtgccgcaatccagtccctggttcatacacagatccgtcataaactgcgcgccatcttccgtccagccattcataaaatcggcatgggcggtataaagacttccccagcgctcttcccgggtttcgccatgcattaccgggtccatcgacaattccactttggacgtatccagcgaggagatctgcgggagtacccaggcgatgtttatattcaccgttgggattttgaccggatagtctgcggaacatttcccgtggtcggcatagatagcgttattgtggctatgggttggtttcaggttgacgccatcccaacagttggggaaagcgatcccgatattaaactggacggcatcgcccgctttacgcaggccgcatatttcgcctaccttgttggtgtaacctttgccgttggcacataaaaaggtgattgcggaactggggccagtaccgtgatgatcgcctgccagtaactccagcccggccgggaatggatggagcggatattgcgctacatttgtggattgataataggtcttttggtaggccggatttacgatttcaccatcaggtaatttcatggacggcgcccagtaagcggagctgtcggctttattatcacaggtggtatcgggttgcgcgcgcaacgtctggtaggtagagaccgcatcggtgtgggtgttgccaaaaaagtcatgccacatcgcctgattcgctttaccaaacatcataatcgcgtcatcgcccagcgtgtggtgatagccgcacacgacatgcgcctgaggaccggcatgggccgggaatgcgccagcggcaacgagcgtagccaggctgacggtaataaggttgagtttcatttttttgctgcccggttgaatagaagtgggagcagcaatagcagatcaaattgcggtgttacatctcattaattatcactttttgtcatttgccctgcatacaggggcgaatttgcagacgtactatttaaataattagccgaaactaccctcctcttgattatgtcaatttacaaaaagggtacgttagtgattaaaatcgggctttttgtgataaccctcactatttcattttgcctatgctaatggcgctcgccataaccgaataacgattctatcggacatcggctttatttttaagaaatgcgttacgacatcagtcgtgacgcgatctgctatggattttttatgagattactaaaacgcgttattgtggttgtactcttgggcgtgattttatttatggtcagggacgatatacgctatgtttatcaactgatcctcaaatatggtgataaaccctcggcgctggcactgagtagctataaagcggttattcagcaaaaaccagtcgcaggagttaagagtaacctttcaggtttgacctactccgccgaagacaggatgcttttcgccgttattaataatccccctgaactggtctggttaacgacagaagggcagctggtaggacggatgccgctgcagggcatccacgacccggagtctattgcatggagtgggggcaaccagttccagataggcagtgagaaagatggcgcggtctataaaacacaggtggatattcagcgcggcaccatgcagataatctccatggtgaagcttgagggctatgacaaagcaaaaaataaagggctggaaggtacggcatgggatgcgaaaaatgagagattatatgccgcaaaagaaagaaaacccattatgatcaaagaagtagagatgagcaaaaatggtatcaccagagcgttgccttctgccatcactgcgagtgtgagcgatgtctccggacttgaataccatgccccaacggattcgctgctggtgttgtcggacgagtcaaaaatgattcttgaggtcagttccgagtggcgggtgcgcgatcgattgttcctgacggcggagtggtcagggctcagagacgatatcccccagccagaagggattgccatggataatgaaaataatttgtatattgtgagtgaaccaaatctgttttataaattttcgtgtgatatacagaatgactaaaatctatttttactgtcacagtatgctaaaacagaacaaggttattaataccatgatttgacgattgtttgattcgttgattcattgttggggatatttatgttttacttacctcagtaacggattactttgtggtgtagcgtaacggtaattgtcctcctcatatttgcggcagcgtagtctgccgcttttttttataaattaactctctctgtaataattaacagacaatgaatattattctgttttttcagcaggcctccgaagagacctcgcatggtgatgtttagttatcaggcatgattttcttcatcaacacttaccgaatgccatgtcgcctcgctaagcgaaatcatttcatctacgccggaactcttgttaaccgggtttttcgtcggcgatgtgcctgtaaatgttccactggcggtatagtccgtatcgttgaccgtgaccttcacctgaatatcctgatgcgcctccacgactcccttaagggtgacggtgttatccagactgctaacagtcgatcccaacgttggttcggcggacggttgtgtatccatagtcagcttaattgttgcgtgagcttctaagcgacccgataaaggtcggtgtattgatgttagtgatattatcgcctccggcgccgatatcactattatcctccatggaacgtactggcggtgtagagtctatcgtcagccagccgatagacagcgaagaattatccatagcgtttgcggaacgatctctgaagatgatatccagagttgccttgcctaccactctaccaacattttaggaaaaattacgtaatatcgactgatatgtaaaactcattcagcatcaaatggattaattcaacatcagtagtaatatccatttttttataggctgatctcttttgtgttgaaatcgtttttatatttcgatctaataaatttgagcaacttttaacagataatcctgctgccacgtaataaataacttttttttcgctcaatgttaggtcgaattttttagcgagcaacagaatcccatctcttatattaatatgttttgctttgttcttatactgcattgtcagatatctcaattaacatattgatgacgagaggaagataaaaacgctaaaaattccgatggtgtagttttgaaatgttttttaaaaacgcatgtaaaataagaagcactatcataaccacacatataagccactcgagtaatattatattcactattgcgtagaagttttgtcgctttattcattcgcgcattaaggtaaacttcgctgaatgaggtgtgctcttgtttcaatttcctttttaatgtggaacaactcatatagagtgagtcagaaatatccttgagcgcccattttcgacttatgtcgcttataataatattatagatgttttcggctaatgtattttgcgatagttctctgaagagagcaaatgcttcaggttcatagatgaactctgaaagcagaaatcttattaaatattcctttttatcttgggataatttctggcttttatttgaagagtgtaagaggttgaatactcttgctacgcctgtttctattggcgctaacagatgttttgtcgtcggttttgttaatggggccgaaaagtctgcatgttcatacagaaaaaaattataagcattttttattgacgctgaatctaattcaattaaattataatttaactgttcatgagtctcttccatagtgatatgaatggtttgatctttagctaaaaatattaacattggccctgatgccgtaatatactccccggacgatgtcgtaattgaaattttacccgtggtgagcttgatgagtacggactgcagtaaatttaatccctgaagtgataaggatttcctctgccagttttgcgctgattgtaaacattcaatgctccccacctggacaggtgagggattaaatacttttagcatgataatttccttttattaaatgtgcgtgtaaatcaaaattattctgaaaaatatttcaaaagaaaactaatatatagctatataattatttgcgaacttaaggtatcaggtggcgatcttttcattttctatggaaaatgctattttatattgcatttctacatattatagtatcgttaaaaaactatgtcgcgtataaaaaaaagatggaaatttacaagaattggctcatgttattatcaatttatctctttaaaatttgaattaagtaataattgcctttaatcttttagagaatagctctttaatttcatggaggtagttagcatgaggtataagatctgatgttaatttgtgataaggtttatcctggatgtaaatattaacgctctcggccaggaaaggcatacaacgcggtaaatatatactgcggcgggtagacggtgtagcgatatccggaagtttgaggggaggggaagcattcaatcgtatggttggctttatgaaaaacggtgtaacacgttagtgaggttcttactgtgcgtatccgttaggtttatgctttctgattatataatgttgcgtgttttggcacggcagtattgaatcttttgctgcgtcggccccgaggaggaatcactcacagcgaatgccagcgcacagcctggtcctgaatctctaaatgagtagaaaacctttcggtttgatactccggttctattccttctaaatttatcgtaatgacatctgcgttacgcgtgttgtatgcttaatatccacagaagtacaagaggacaacactatgccagccgcaaacagtatggcgatgaaacgcgaaaccctgaacctgcgtatcaaacccgccgagcgcgatcttatcgatcgagcggcgaaagccagagggaaaaaccgcacagactttgtgctggaagctgcccgcgctgccgcagaggaagcgcttatcgaacaacgcatcattatggccgatccagaggcttatcaggagtttctcgttcgtttggatcaaacaccttcacctaatgccgcactgcgtaaaaccatgcagacccctgcgccgtgggagcaggaaaaatgatctccacccctgagccgcttcatgccggacatattcttactccgttttgctgcggtgtggattctatagataactggctggaacagcgggcgatgaaaaatcagaccactggcgcgtcccgtacctttgtgtgttgtggcagcgattcgaacgtactggcctattactcgctggcgtccagcgcggtcacgacgaatacctcccccggtcgctttcgtcgcaatatgcctgacccgattccggttgtggtattggggcgtctggcggtggataaatcgcttcatgggcagggcgtcgctcgggcgctggtacgcgacgcagggctgcgggttattcaggtggcggagactatcggcattcgtgggatgctggttcacgccctgtcggatgaagcgcgggaattttatcagcgggtggggtttgtaccgtcgccgatggatccgatgatgttgatggtgacgttgggggatttggtggagagtgtttaaactccagaacgcatcccttagcttctgatggccggaattcgctgtggatagtcagtgagccagaccggttttaccgcttcagccggacaacgacgtcatgacggtctggacggactgcaaacgggggaagggggcgttgaattcatgcgaatcggggaaaccaaaggcattctccacgcccggccgcccctacgcagttgcacttcctttcatttgctgtggccagtttgcgggaagactttcaccttcagtaattaagtttggggtgatcttctttactcaataaattatttttgtcgttcagctcctcacggacttttgccagtgacttctgaaaagccgggattgtttgcagtcttgcaaactctactgctcccacataacggccagcatcaacatcgctttgccagtgagcaccgcatatcactctgctttgcccgaactcccatccgcgtctggcgagctcctgcgcgcgttccggtctggcctcggataatactaatgccagaagtgtaccataagcagtatgcccggaagggtaagagccattttttcgcaaagtattctcatcttcaggacggcaggtggaatgattaaataagacaaaggggcgggtacgcatataatatttttttgccgaagcagtagcgtagtagccgcccattgtcagaagattctttaacatattccaggtttctggcgtatctttggggttaattttagcacccactactggcgagaatattctggctatattttccacgcttacatctgcatcctcagcagcttgtttccatcgcggggaaccctttatcgcatagcccttaaaataagcctccttatcatagcggtaagccggatcatcattacctggcggtggtggtaagtagaactgactgttcactgattcttcaggagaatgaaagggttgcactgtttctgctgatgtatatttagctacgatcagtggtagaaaaaatactaaataacgacttttcataaagactcactccggatcaggcaataataaacagatgtaatcctataatgatttattgcaatggttattcaacatacaggtaaaaaagcaggacgctgccctggcattatcgtctgtccataccggactgactgcagcggacaacagaacaataccggtacttccggctaacagcattttgtttaacttttgtccccgattattttttatctacgtgcctgactgacacgcattaggttaaaatctttccgtaataacacagtatgaataattattttaaagtatgtgctctgttaccccgataactaccatcagtcatgatgtgctgagtattaatttatgattatgaacaagagtcggaaacagtatttaagaataaagaaaccgaaaaagaaaaaatgctaaaattggcgaagggattattgttatcagtgatgaaaaagttcatggcggagatattggattcacttgtcggggttagcgaaccgtcagatggagtgatacgcgttattactggtaataatctccctgtagctaagtaagctttcctgacaggcgtgataaaagttccgcgcgataaaaaggcttgtacctggcattataagactcgcgtcctgcagaaacagggcagggaagggctcggcggttttaatcaggtatatctgttaaatcacatccttcaactggagcagcctttgttttaaccttcctctcatcgggccggaatgcttcgcctgcgttgatgtagcagaaaccggagaaatcacgccatccgatttcttgcaaatatcaggcgcaaaaaaacagacttgcgctaacaagtctgttctttaagagcctttcttttaacaacaagtaacagcgttacatcgtgtttttaccggcttgcctttgtgtccgtcagcattgcatcttgcaaatctgatcaaccggctttgaatagtggtgcggactcggagtcatattcacgattaacgtgctgtttgttattggttttgttggtatttcttacaaacagcgctcccacgaaggcccccataaaaaatcgctttatttttgtgatggttatcacgaaaaatcgtcgtttaagggtagggcttcgttatgtgtcctggtccatatataacgccagaatgagttggtttaaattttcaccaaaaagtcgcttctgaatcgacaaatagagtaatttttcaacccgtcgacttttcacccagaaatcacacaccgctcctcaccgtaccatagctgtgaacgctccaaatccacgaattccccctcatcgtcaataagctcctgaagggcgcttaatccttcttctgtttttcgggctgcaatatgcgattccagactgtcccaccacaactcggcgcaaccatcaaaatcgacgggcaatgaatttcttgtctgctgaagcgctgattgcgcggcactgttcgccaggggaactgtctggatgtacttacgaataccaagacgttctgagtgtttaaccaccagtgaggcatgttggttacgccagtaatgatcaaattcttctcgcgttaaatgggcacgccttttgacgcacatgactagttttaacatgttgctactcctgtcatttcgggagttcaaagcttacactctgacagcggtgtcagagtcaagaggacgttatgcagattggaaaactggcggcattgactggcgttagcatacggatgcttcggtactacgagagcgcaggtttgcttcatccttcgcgaaccgatacgggctatcgcagtttctcgtcagaagatgtggatattgtcagacggatacttattctaaatggtgcaggtttcacgttaccggttgtgtgtagtttgctgaactgcgtacatgcaggaacctcaccttgcgaggaactaaaagctaaagtgcgagaacaactggcacagatagaccgtcagtttgacgcgctctcggaaagccgcaatcttctcaataagtttcttaatgactagcccctgacaatttaccttctaacaccatgtgggaaatggattctactcctccgattgaacattgttcaaattcacatttgatattgaccctggcccaaagatgagcggctgatcgacgaagcgctgggcgttgcgccagagaaaatctggccttctcgttatagctagtcaggccagagatgggggctacggatttccattcccagaaaagcaaaaacccagccataggctgggttttctgaataagtggtgcccggactcggaatcgaaccaaggacacggggattttcaatcccctgctctaccgactgagctatccgggcaacggggcgcattaaaccgtaaaggggcgcggtcgtcaacggctttacacgaaaaaagtgataaaagcgcgctgactgcctgcttttcaggcaaaatgcataaaatcagtacccgtcaggtgagcgctccaccctgacggcactgtgcaaaacgcagaatatcttccgccaaccgctgagcggtatctacatcagcctgactgcggttgaccagcattcggctgagacaaccttccagcaccagctccatctgccttgcaaccatcgccggatcgtcaatttccagcgtggtcagtagctcatgggtaaaatcatgtgccgcgcgtttttgttgattagccagttggtgaataggatgggttgggtcgggataaaacgtacaggcggcaatgaacaagcaaccaggataacggttattactgacacattccgaaagcgcgctgtagcgtgccagtagcttttgttcagcagaaagcgtctcatcaagaagaagctggcgtcgccagatatctacctgctgactcagataacgtagcgcgtcatataaaatggcttctttatctggccagaaacgctgtaatgtgtcgagtgggcgatttacgcgctccgccaccatttccagcgtagtatcggctatcccttgcgtctccagtaatttcagggcttctcccagaatatcttcacgttgcacggtattctcctccgtctttgcttttgcaagtgtcgctcacggttggcgatcgtgcaaatgcgcgctaaaggtggcggcgtccataaagccggtgactcgcgattgcggctgttcctggccttgggtattaaagaacagaatggtgggcagcccgaggacttgcagatgctttaacagcgcgacatcctgcgcattgttagcggtgacgttagcctgcaagagcaccgtgtcgccgagcgcctgctggacccgcggatcgctgaaggtatacttttcaaactctttacaggccacgcaccagtcggcgtagaaatccagcataacgggtttgcctttggcctgcgccagcgcctgattgagttcatccacggtagaaatagccgtgaaattgaggtgcgctggagcttgcgcggatggcgatccgaacgcccaatcctgtagaggccgcacgctaatgagcgctgccgccagcaggataatctgtacgatacgcatccacgctcgtctggcctgaaggctggtgataaaggcccaaccaaagaaagcgacgcccagcagcgaccacagacgtaaaccccaagcctcgccaataatccgctccagtaaaaagaccggtaacgcgaggatcacgaaaccaaaagcggttttaacatgcgccatccacgggccgcttttcggtaacagacggttgccaaacacggtgaccagcattagcggcagacccatacctaatgcatacaaatacagcgtgccgccgcccagccacatgttgccgctctgagcgatataaagcagaatcgcgcttaacggcgctgtagtgcagggcgagcaaattaatccggcaatcgcccccataacaaaaacaccgccgggcgagccgccttgctgacgattactcattaatgtcagccgggtttgcagtgaggaggggagctgtagtgtgaacaggccaaacatcgacaacgcaagcagggtgaacacgatggcaaggccgattaacacataagggtgctgcagcgccgcctgaaactgtaatcccgccgcggcgacgaccagacccagtgcggtataggtcagcgccatcccttgtacatagataaaggccagcagcagtgcgcgccccgtcgacaaacgttgccttccccccaggacaataccggaaatcagcggatacatgggtaaaacgcagggcgtaaaggcgatgcctatgccgatcagcagcgcccagagcgcggaaaaaggtagctgggcggcgggttttgacgtctcactcgtctgggtgacagcaggcgtcggcgtggcgtctattgccgcggcgacttcacttagcggcaccgttttcgtttccggcggataacagaatcccgcatcggcgcacccctggtacgttaccgttaatgtcgcgccagccgccgcctggttaaccgttactggaacgtttagccgcttacggtagatttcgctttttccgtagaactcatcttcatgccagacgcctgtcgggagttggactgcggcgatatccgctttcgtcggcgtgatactgatttgtttacggtaaaggtagtaaccctcttttacctgccaggagagggtaagatcgtgttgattttgctgaaaatcaaaaacaaacgcccggtcggcagggacgaactgcgagcgacccggcgcgtcgaataatccggcgaaggcggatgtgctgcacagcagcaggatcagcgtaaagatgcgttgagccatgagaggtaatcagtatctccgtgagtaacaggtaaaaccagaagttcaggcgtttgatacgggtgatgagacttcaggcagtcgataagcgcttgctgatgtgaaacggtggtttttaagatcatttgaacttcatactcctgctccagtttgccttcccagtagtacagcgatgtcgcgccggggaggagggtggcgcaggcagccagtttttccgccagcactttggcggccagatcctgggcggtagcttcatccggggcggtacaaagcaccacaacggcctcggggatggaaatatcctgactcttaacatcaagcataaacacctcgaaagaacaaaaagacccgcaagtgaacggtcactatacaacggacgagggcaggatgttagtcaaagggcgggagaatgcggggcgtgatacgccccgcgggtgaaacacttacagcataaagctgcccagcaggaagccgaagcagacagccagaacgacgcccagggtgcctgggatgaagaacgggtggttaaagacgaatttaccgatacgggttgtaccggtgtcatccatctgtaccgctgcaaccagagtcgggtaggtcggcaaaatgaacaggccggaaacggcggcgaaggaagcgactgccgtcagcggagagacgttcagcgccagcgccatcggcatcagcgctttcgccgttgccgcctgagagtagagcagcgcggaagcaaagaagaagatgacggccagcagccacggatgaccctggatgacgctacccgcagtgtctttgatccagtcgatgttagcggatacgaaagtatcgcccagccacgccacgcccagaatacagatacaggcgctcatccctgctttaaaggtactggagttgaggatggcgtcagtttccactttacacaggatggtggtcagcgttgcgacgctcaacatgatgatcaaaatagcgttggtggtgttcatcagcggtttctcaaccaggccgaggctcggactgttaacaatcgcataaacaaccacgcagataacgcccagcaggaacagccagacggaattttttgccattggtttgatttcaatctgcttttcaccacgcagttcaatcagcccttcttccagacgcttgcggtaaatcgggtcgtccgacagtttggagttgaacagcatcgtgaccaggaaggacatcaccagcaccgccagcagcgtagaggggataaccacggacagcaggtgaatatagctaatgccatgaccttccataacagaagacatatacaccacggccgcagaaatcggcgaggcggtaatcgcaatctgcgcggataccacggcggtcgagagcggacggcaaggtttgattccctgctccttcgcgacttcagcaataaccggcagcgttgccagggaaatattcccggtaccagcaaaaatagtcaggaaataggtcacaatcggtgcgaggatagtgatgtatttcgggttcttacgcagcagtttttccgtctggtttaccaaataatccagaccgcccgcgacctgcatagcagagatcgcggcgataaccgccatgatgatggaaatgacatcgaatggaattgtccctggcttcacgccgatggcggcaagtaccagaacacccagcccacctgcgaatccaataccgatgcccccaagtctggcgcccaaaaagattgccagcaaaacaatgataagttcgacaactatcatattagccttccttgttgtttaacaagttgatattaaattgttgttatttggtaacttcttgtaagaaaaaaggcacgtcatcgtgacgtgcctctttggtactaccctgtacgattactgttcgctttcatcagtataacgtttagctttataagccgggtgcatcaagttctgtacggagaaaatatcgtccagctcggcttccgttaacaggccgcgctccagcacaacttcacgtacgctcttaccggtttcagcacagattttaccgacgatgtcgccgttgtggtggccgatgaacgggttgaggtaagtgacgataccgatggagttataaacgtacccttcgcacacttctttattcgcggtaatgccgttaacgcatttttctagcaggttgtagcacgcgttgctcagaatgtggatggattcgaacatcgcctgaccgataaccggctccataacgttcaactgcaactgaccggcttccgccgccatcgtaacggtggtgtcgttaccgatgactttaaagcatacctggtttacgacttccggtacaaccgggttcactttggctggcatgatggaagagcccgcctgcagttccggcaggttgatctcgttcaggccggcacgaggaccagaagagagcaagcgcaggtcgttacagattttggacatcttcactgccaaacgtttcagcgcgctgtgaaccataacatatgcgccacagtcagatgtcgcctcaatcagatcttcagccggaacacaggcgaaaccagtgacttcagccagttttttcaccgccagcggagagtattctttcggcgtgttcagaccagtaccgattgccgttgcgccaaggttgacttccagcagcagctcagcagtacgctcgatgcttttcacttcttctttcagcaggatgctgaacgcacggaattcttgaccaagcgtcatcggtacggcgtcctgcaactgggtacgacccattttcaggatgtcctggaattcaaccgctttacgttcgaaaccttcacgcaactggttgatggcatcgatcagtttgacgatagaggcgtaaaccgctacacggaagcctgtcggataggcgtcgttagtggattgacatttattcacgtggtcgttcgggttcaggtactgatattcacctttctgatgacccatcagttccagcccgatgttggccagcacttcgttggtattcatgttgacggaagtgcccgcgccgccctgatagacatctaccgggaactggtccatgcacttaccgttgttaaggacttcatcacatgcggcaatgatggcgttcgccacactcttaggaatggtttgcagctctttgttggccagcgccgccgctttttttaccataaccatgccacgcacaaattcagggatgtcgctgattttgttattgctaatgtagaagttttcaatcgctctcagagtgtgaacaccatagtaggcttcagctggaacttccctggtacccaacagatcttcttcgatacgaatgttgtttgacatgtgaaccttctttttcaagctgccaatgatttttactttaaaacacacaggatatatgtgatttcgaatgttttctgaccgacgattatcccctccatcggcctgataaacgagatcatatgctggttcagaattcctaccgtaatctggatcacttaaagtgtgggaatttaccccttatttattattttgtgaaataggtcaccgctttagtattactacctaaaataggtgtacaaaccacttgaaattttgctacgcaccaccatatcgaatcgatgcgaatcgcaaccccattcaaatggtcgtcgcagacggccatgacttacaggagagtcctttgcgctggataccctttttagctgtctttctctatgtttacattgagatttctatctttatccaggtcgcccatgtgcttggtgtcctgatgacgctaatcctggtgatttttacgtctgttatcggtatgtcgctggtacgtaaccagggttttaaaaactttttgctgatgcaacaaaaaatggcggccggtgagagcccggcggcagaaatgattaagagtgtatcgctgatcatcgctggcttactgctcctgttgccggggtttttcaccgattttctcggccttctccttttgttaccgccggtgcaaaaacatttgacgctgaagttgctgccgcatttacgtttttcccggatgccgggcggcgggtttagcgcgggtactggcggtggcgaaacatttgacggcgagtatcagcgtaaagatgacgatcgcgatcgtattgaacataaagacgatcgtcgggattaaaggtagagatgctggccggataagtcgcgtgaggcgttatccggccaacagatacgtcttacgccatgcgttttcgcttcggtaaaaacagccataatgctgccagcatgataatggcatataagcttttccaccccagcattaccagcaataacaggcacagtagacaacccgtcaccgccagtgcatagcagcgccctttcaatagtcgacagcccgccagcatacaaagcagatagagcataataaaaataccgttagcatagacgatcagcgcattgaggttaatcttcagggcgtagacgaccagggaactcacgcaacaacaggccagaataacgtttaacgcgtgcaagggaaggcgcccgggagagagttgagccagatagtgatcgggctgatattgcatttgcgtccatatcagacgcgcaaaactctgagcatacacattcaggctggcaaagcaggtgagataaccaataatgcaggctatccacaacgcctggataccgaagagatgaacaataataagcggtagcgatgctgttgccgctatcttgtcgctatagacgccaaaatgcagcaccacggcggtacaggtccaataaatggagccggccagcatcaggccaatgatcaatgcgcgcggaaaatcacgttcaggatttttaaattcagacgacaaatgcgtaaaagcctcaattcccacaaatccccagaacatgatcgccagggcggtacacagccgggaaaaggtgatttcgtttgcggctgggaaggtgatatctgcaggtttaatcgcgcctttccacagaatggcggcaataagcgcgataattaatccagcgataatggcttgcaggttggcgctggagctggcgccgcgcgatcccataaaccatagtaaacctagagtacccagctccccaaataagagctgttcgctttgccagccaaacagcgcctggccgaaacccaccgcaatatgcaaggctgcgggaaaactaacaggaatgactgataaaaacagccaactgatcacccgttgcagacgcgggccaaatgccatcccgacaaaatgcgctacgccgccagcgtgtggaaagtgacgccccagcacagcaaagacaatcgcaatagggaaaatcaaaataatgagcagcggccatgcccaaaggctgatgtcgcctgccgccagcgcagccagctccggaagcgcaaaaacgccagtccctaataatgatgtggttaacaagataacgccctgaaccaacccaagctctttttttagttcattcatcagctcattatccggcggcattgtaacgtcaggtgacgacagacatttttaagcgtatcacacacgccttttcttatagcaggatgttctaaaccttgggtaaacgtgagataagtagcgtttttaccgcttttttcgctcagaagaattttttttcatctccccccttgaaggggcaaaaccccatccccatctctctggtcaccagccgggaaaccgtttacgggccggcgtcacccataactgataatgactttctcaaaggagagctatcaatgagtattcgtccgttacatgatcgtgtgatcgtcaaacgtaaagaagttgagtctaaatctgctggcggcatcgtactgaccggttccgcagcgggtaaatcaactcgtggcgaaatcatcgctgtcggtaagggtcgcatcctggacaacggtactgtacagccgctggacgtgaaagttggcgacatcgttatttttaacgatggctacggtgtgaaatctgaaaagatcgacaatgaagaagtgttgatcatgtctgaaagcgacattctggcaattgttgaagcgtaatccgcgaacgacactgaacatacgaatttaagggaaagagaaaatggcagctaaagacgtaaaattcggtaacgacgctcgtgtgaaaatgctgcgcggcgtaaacgtactggcagatgcagtgaaagttaccctcggtccgaaaggccgtaacgtggttctggataaatctttcggtgcgccgactatcactaaagatggtgtttccgtagcgcgtgaaatcgaactggaagacaagtttgaaaacatgggcgcgcaaatggtgaaagaagttgcctctaaagcgaacgatgctgcaggcgacggcaccaccaccgcgaccgtactggcgcagtccatcattaccgaaggcttgaaagccgttgctgcgggcatgaacccgatggacctgaaacgtggtatcgacaaagcggttgctgcggcggttgaagagctgaaagccctgtccgtaccgtgctccgactctaaagcgattgctcaggtaggtactatctccgctaactccgacgaaaccgtaggtaaactgatcgcggaagcgatggataaagtcggtaaagaaggcgtcatcaccgttgaagacggtaccggtctgcaggacgaactggacgtggttgaaggtatgcagtttgaccgcggctacctgtctccttacttcatcaacaagccggaaactggcgcagtagagctggaaagcccgttcatcctgctggctgataagaaaatctccaacatccgcgaaatgctgccggttctggaagccgttgcaaaagcaggcaaaccgctgctgatcatcgctgaagatgttgaaggcgaagcgctggctaccctggttgttaacaccatgcgtggcatcgtgaaagtggctgctgttaaggcacctggcttcggcgatcgtcgtaaggcgatgctgcaggatatcgctaccctgaccggcggtaccgtaatctctgaagagatcggtatggagctggaaaaagcaaccctggaagacctgggtcaggcgaaacgtgttgtgatcaacaaagacaccaccaccatcatcgatggcgtgggtgaagaagctgccatccagggccgtgttgctcagatccgtcagcagattgaagaagcgacctccgactacgatcgtgaaaaactgcaggagcgcgtagcgaaactggcaggcggcgttgcggttatcaaagttggcgctgcgaccgaagttgaaatgaaagagaagaaagcccgcgttgaagatgccctgcacgcgacccgtgctgcggtagaagaaggcgtggttgctggtggtggcgttgcgctgatccgcgttgcttctaaaattgctgacctgaaaggccagaacgaagaccagaacgtgggtatcaaagttgcgctgcgcgcaatggaagctccgctgcgtcagatcgtgctgaactgcggcgaagagccgtctgttgtcgctaacaccgttaaaggcggcgacggtaactacggttacaacgcagcaactgaagaatacggcaacatgatcgatatgggtatcctggacccaaccaaagttacccgttctgcgctgcagtacgctgcttctgtggctggtctgatgatcactaccgagtgcatggtgaccgacctgccgaaaagcgatgctcctgatttaggcgctgctggcggcatgggtggtatgggtggtatgggcggcatgatgtaattgcccaccccctgcatccttcaggctgcagatgcgttggctaaccccagtcacttacttgagtaagtgactggggattaacaaactggccgccttcctgcaaccagaatgatttgggtgcttatctcccagaattgagaaacccccgggcagaaatgaccgggggtttttcttttagtcatctttttagtataagattcagatacggacaaaacgtccagctcattgattatggggaataacatgcacgtgaaatatttagcagggatcgttggcgccgcgctgctgatggcgggttgtagctccagcaacgaactcaccgctgccggccaaaatgtacgctttgtcgaagataagccgggcgcggaatgccagcttattggtacggcaactggtaaacagagtaactggttttcaggccagcacggcgaagagggtggctcaatgcgtggcgcagcgaacgatctgcgtaatcaggcagccgcgatgggtggaaacgtgctgtatggcgtaagtagtccgtcacagggcatgttgtccagttttgtcccgacggccagcgagatgaacggccaggtttataaatgtccgaactgatatgtctgaatcgtaacgccctctgaaagattcagagggcgatatggttagcgtttttcctgcgatgatgccatgcgtagattatgcaacgcgcgcatgcattgatcttgcgtcagacgcgctgctttaccggttccaagcgttctgacaaaaaccttacacggttttccttccagctttttaagacgcgggctgaaattcagcaagcggcgtgatattgcttcagcttctttagagcctgactgactacgggtcttaatgatggtgccgcaatcatgcgattgtcctgcctcatccgtataacgataaacgagcgctaaataatggttatacagattatgtttccagtcaggctggttataggtatcgaattcgatattaccgttttccaggcagtcagcatcgtataatggtaaaaagtccagcattgaagaaatacgcaatgcgagctcacgcatttcggcattattaatggcgtgaataatagccatcaccagaacttcaacctgccactcaccgacctgtaaatcaagatggctaccattgtgcagctttaacgtaaaggttaatactttttctgtattatcgctcaacgctaaagattcaacacgctgattaacatcggcgttttccagctcttcacggagtattgccggaatattctcatgcattttaagcacatgactgcttttagctttctggcgtttttcctgctcttgttccggaagcgagtgttgtagataaagccggtgttcaaggccgatcaacaagtctcgcagcgcgagcacaggaaagaaaagcagtgtttctttatttctcagtgacttcaccttaagcgccagcgcgataaacttatcattgtgacgaataacgccggtatttagtcccttaatcgttaaggccatgtcaattctccacaaatataaaataattaaatgttttactgcaatgtatttgatatataaattgtttatgccgtcctataaaaaggagaaccagtataattcgaaaatgcagtacacgctaagcgagtcctaaaacggactttattgaaaagagaggaccggaaaggtgtatttaacgaaggttagtttatcctcgccaaagggtgaggagaatcgcgggggagtctcctcgtaatattgcgcggtaatatttttcgtcgtccctgacgcgcccgcgaggattagcactgccgaagctgtaaatccagcggtgttttgctcggttcgccgccgatttcacgcgccagtcttggcaccatatagccggataccagcgtgagcagttcgcgcatgatttgccgggcttcgtcatcggtgaccataaaatgcgcggcgccctgcactttatccagcacatgcaggtaatagggcatcacgccggcgtcaaatagcgcgttgctcagattcgccagcgttcgcgcgttatcattcacgccacgcagcaggacgctctggttgagaagcgtgacgcccacgtggcgcagtttcttcatcgccaggccgaacgcctcgtccacttcattagcgtggttgatatggttcaccaacaaaatttgcagacgtgactggtcaaagcgggcgaccagttcgtcagtaatgcgtgccgggatgacgataggcaaccgactgtggatgcgtagccgcttgacgtgcttaatggcttccagttgcgtgagcagccagtccagctcatgatctttcgccatcagcggatcgccgccggaaaagatgatctcatccagttccgggtgtgcggcgatatactccagcgcgactgtccagttgcgcttattgccttgattctctgcatacgggaagtgacgacggaaacagtagcggcaatttaccgcacatccgccttttaccagcaatagcgcccggttttggtatttatgcaataatcctggcaccacgctgtgttgctcttccagcgggtcggtggagaaaccgggggcgacaataaattcatcccgggacgtcagcacttgacgtaaaagaggatcgtcagggttgcccttctccatgcgcgcaataaaagcgcgcggcacgcggagggcaaacaagcgcctggcgtcctgtcctgcccggaggttttcatcagcttcaatctgtaaaagatgcagcagttcgtcgggattggtcacaacatcggcaagttgcgctaaccaatcttctcgcaatggggtatttagggttacaatatgcgccattttgtggcttagctaccagttaacaatttcagagggccttatggcgacttactatagcaacgattttcgttccggtcttaaaatcatgttggatggcgaaccttatgcggttgaatccagtgaattcgtgaaaccgggtaaaggccaggcgtttgcccgcgttaagctgcgccgtctgctgaccggcacgcgcgttgagaaaaccttcaaatcgaccgattccgcagaaggcgcggatgtagtcgatatgaacctgacttacctgtacaacgacggtgagttctggcatttcatgaacaacgaaaccttcgagcagctgtctgcagatgccaaggctatcggcgacaacgcaaaatggctgttggatcaggcggaatgcatcgtgaccctgtggaacggtcagcctatctctgtcactccgccgaactttgttgaactggaaattgttgataccgacccaggtctgaagggcgataccgcaggtactggcggcaaaccagccacgctgtctactggcgcagtggttaaagttccgctgttcgtgcagattggcgaagtgatcaaagtcgatacccgttccggcgaatacgtatcccgcgtaaaataatttacgttatcgggaaaaatggtgcagcgtatgctgcgccatcctatttttcgcgcctcaatgatgaaacgctttatcggtcttgtcgcgctggttcttcttaccagcacattattaacggcatgtaataccgcccgcggcttcggcgaagatattcagcatctcggccacgccatctcccgtgcagccagctaatcgcttctcgtcttcctaaaattagtcgatcgcccatcattttctgggatgttgtctattattaagttgctatacacaaacaacattggctagaaaaggaagacattatggttaaaaagacaattgcagcgatcttttctgttttggtactttccactgtattaactgcttgtaataccacgcgcggcgtgggcgaggacatctcggacggtggtagtgcgatctctggcgctgcaaccagagctcagcagtaatcatcaacggtacggcatggcgtcgtaccgttaatcgattttctccggaagcataagaaagggagaataccggttatccatatgaagtttcatacggatattacgtttataggtgtaaaccgttttcccgtgaatgccaagcgcatacgcaatctctttattgctggtgccttccgtccacatcgcgagcactttttcctcctgcggagagagcaatggcgtggcgctttccggcgcttcctgcagtggatgagtatgtagcgctcctttaattcgttgtgcaagctcatgtaaaggcgtgtgtttagataacaccgcatgactggcatattgcggtctgtacggcatattccctgactgtaataataccaacggcgtcatcctgcaggcggcaaaaaatgcattgataggctgttcgggtaaggcatcgttgagaaaaccatataaatcagcgataaccaggtggggcttccattgcagaatatgttctttcgccagtataaggttattcatcccggataccagcagtgaagaactgagcacatcagtgtgattaagccaggcctccatgcccgtacgggtaaagtggcatcggtctatcactaaaattttcaacatagttttttgcacccggaagtagataaagcactttctttcccagaaggcgttccatcatagagaactcctgtgggcgctaaatgcgaaaactacgcggcttaaaagggccaattcccgcctttagacggaaaaaaataaaaaggttgaaattcattttctctcaggcaagaatggcttttcatccgtatacgttacaggacgacctgtaaacgctattctcaccggggacggccccattaattatctggagcctgctatgtcctggatcattctattaatcgctggtttacttgaagtggtatgggctgtcggcctgaagtatacccacggtttttctcgtctgacccccagtattatcaccattacggccatggttatcagtatggcgttactttcctgggcaatgaaaacgctgcctgttggaacggcgtacgccatctggaccggcatcggcgccgttggggcggcaatcaccggtatccttctgctgggcgagtctgcctcaccggcgcgtttgctcagtcttggcttgatcgtcgcgggtatcattgggctaaaactcagtgcgcattaattcgtcgctgatattgctacgaacctgattgttttacccaaattaatttattgacgtcaaacccctcccgggtcgcgacggccagcatttgctgttttatttcctcagaaagcgttggcgtgcgagagagtatccacagatagtcgcgatccgggccgcacaccagcgcatgacggtattcccggtcaagcgcaatcacgttatagctgccgtagaacgggccgaaaaaagagaccttgagcgcggcgcggtttggactaccggtaaaatacgctttgccttctgttttttgccacatttcccgatccgggttatagcctttattgatgacattaatcccgccatcgtcacgcagactataggtggccgtgacttgttccagtccacgttcaaatcgatgatcgaggcgtgcgatctcataccaggtgccgaggtaacgtttggcatcaaagttatttaccacggtaacgcctttaggcggggtaggcgaactacaggcgacaaccaaaaatgccgcagtaaccgcagcaacgacgggcagcaagcgcatagcgtttttccttccagtgttttttctaagtgtagaacctggcgggaaaatgagaggcaggaaaagaaaaaatgccctcttatcgggtagataagagggcgtcgtggcaacttagagagagataacgccaatcgccgtcacaacggtcaggattgccgccagaccgtagaagacccatttgcccgcgggcacgtggattttcaggtcatgcatcgcgtggtgcatacggtgtaggccacaccatagcggcagcacgatcatcaggaacagaaaaacgcgaccaatgaagctttgggcgaacgtcagtacgcgctcaaaactcagggcatcgcccggaaatagccccagcggcagcatgatgccaaccagtagcacgatcaccggcgcgatgatcgcgccccacataccgcctgcgccaaacagtccccagaatacgggttcatcagaacgttttgggtttggattaatcatccgggactccttaccagaacagggcaacatacagaatgactacggtgactaccgcagtgaccacccaaagccctttgatgattggctctggccccattttttcgtcttttacaatgatattggccgccttcggcgccagttcaaaccaggttttggtgtgcagcagcgcggccgccagggtgatcaggtttaagatcaccaccaccgggttttgtaaaaagccgacgaatcccatccaggattccgcgccgtgtttgagcgcaaacagaccgaaaatcagttcaatactgaaccagactgccggcaccgctgtgccttcgcgcagcatataaaagcgataaaacggcagttttttccaccaggtggacgtcatcggccgcacatagggtttgcgtttagtcgtcatgttgcactccttagcgtggtttcagggtggcgataagaaagtctttcgagctttccactttaccctgctgaatggccgcagccggatcgacatgttttggacagacttcggagcagtagcccacgaaagtacaggtccatacgccgttcggactgttcaactgcgccatacgctccttcttaccgtgatcgcggctatcttcgttatagcgatgcgccagcgtaatcgcagccggtccgataaattcaggattcagaccgaactgcgggcacgcggcgtagcacagaccacagttgatgcaaccggagaactggtgatacttcgccatttgcgccggggtctggacattcggcccctgatctggcgtgcgagagttgccaataatgtacggtttgatcgcttccaggctttcgataaagtgcgtcatatcgacaaccagatcgcgttcaatcgggaagttcgccagcgcttccaccttcataccgttggtgtaatcgcgcaggaaggttttacacgccagtttagggacgttgttgaccatcatgccgcaggagccgcagatcgccatacggcaggaccagcggtagctcaggtctggcgacaggttatctttgatgtagcccaacgcgtccagtagcgatgttgtttcatcataaggaacttcatagaaagcactgtgcggcgcggtatcggtttccgggttatagcgcaccacctcaactttcaggtttttcatctcagccattcgccttctccttcttatcggctgcttccgcttcaccgccgtaaacacgtttggctggcggcagggtggtgattttcacgtcgctgtattccagacgggtcgtgccatcagcatcgcggaaggcgagggtgtgcttgaggaagttcacatcgtcgcgctcggtacagccttcatccagacgctgatgcgcgccgcgggactctttacgcgccagcgcagagtgcgccatacattccgccacgttcagaccatgacccagttcgatggtatacagcaggtcagtgttgaacacgctggaggtatcggagatacgtacgcgcttgaaacgttcctgaagctcggccagtttatcaacggttttctgcatcagttccggggtacggtaaataccgcaaccttcttccatagacagacccatctcatcgcggatcttcgaccagttttcgttgccttcctggttcaccagatttttcagacgctgttcaatatcggcaacctgggcgtcgagcgcggcgctatttgcggcgcctgccgtagcagcgcgttccattgcttgttcgccagccagacgaccaaacaccaccagttccgccagtgagttggaaccgaggcggttcgcgccatgcaggccaacagaggagcattcgccaacggcaaacagccctttgacacggctttcacagttctggtcggtttcaatgccgcccatggtgtagtgcgcggtcggacgtactggaatcggttctttaaccggatcgacgccgacataggctttcgccagttcgcaaatgaacggcagacgttcatgcagtttcttctcgccgagatgacgcaggtcgaggtgaaccacatcgccgcgcggcgtggagatggtgttgcctttacgccattcgtgccagaaagcctgggatactttgtcacgtggccccagttccatatatttgtttttcggctcgcccagcggcgtttcggggcccatgccgtagtcttgcaggtaacgatagccatttttattgaccagaataccgccttcgccgcggcaaccttcagtcatcaggataccggaacctggcaggccggtcgggtgatactgaacgaattccatatcacgcagcggaacgccatggctcagcgccatgcccatcccgtcgccggtgacgatgccgccgttggtgttatagcggtatacgcggcctgcgccgcctgtcgccatgaccacggcgttggcacggatttgcaccagcgtgccttccatcatgttcattgccaccaggccgcgcgcatggttgtcatcaaccagaatatccagcacgaaatgttcgtcaaagcgctggatttgtgggaactgcagggaagtctggaacagggtatgcagcatatggaagccggttttatccgcggcgaaccaggtacgctcgattttcataccaccgaagcgacgcacgttaacgctaccgtccggacggcggctccacgggcagccccattgctccagctgcgtcatctcagtgggacaatggtggacaaagtaatccacgacatcctgctcacacagccagtctccgcctgctaccgtatcgtgaaaatggtagtcaaagctgtcatgatcctgggcgacagcggctgaacccccttcggcagcgacggtgtggctgcgcatcgggtacacttttgagatcagtgcgattttagcattgggattcgcctgtgcggcagcaattgcagcacgtaatcccgcgccaccggcgcctataatggcaagatcggcttgaaaggtttgcacgacattcctccagattattgtaatttcaccctcgcgcagccagataaagcctctgggttctgcgaagtatgaatgcgtttccactgctcctttatgggtacaacagtatagtctcagggatgtgagggaaatttgacgtgttcgatttttttagcgtatcagagggatgaattatcattgattttgattaatttaattactaaaccatctgaaatcactttttttaccctccagaaggcgcccgatacgcctgcgcaaaatttgtttcgcccgcgcgttgcgagtagacttcgtgaccttgtcttaaactggagaaagaatcatgagcgaaacggcaacctggcagccgagcgcgtccatccccaatttattaaaacgtgcggcgattatggcggaaatccgtcgtttctttgccgatcgtggagtgcttgaggttgagacgccctgcatgagtcaggcgacggtcacagacattcatctgttcccgttcgaaacgcgtttcgtcggacctggccattcccaggggatcaacctctatttaatgaccagtccggaataccatatgaaacgcctgctggcggcagggtgcggcccggttttccagctatgccgcagtttccgtaatgaagagatgggacgacatcataatccggaattcactatgctggagtggtatcgcccgcattacgatatgtaccgcctgatgaatgaagtggatgatttgcttcagcaagtgctggattgtcaacctgcggaaagtctctcctatcaacaggcgtttcagcgccatctggagattgacccgttatcagcagataaaacgcaactgcgtgaggcggcggcaaagcttgatttaagcaatatcgccgatacggaagaagaccgtgatacgttgctgcaactgttgttcacgatgggggttgagccgcatataggtaaagaaaagccgacctttatttatcactttccggcaagtcaggcatcgctggcacaaatcagtaccgaggatcatcgcgtcgccgagcgctttgaggtgtactacaaaggtattgagctggcgaatggtttccacgaactgacggacgcacgtgagcaacaacagcgctttgaacaggacaatcgtaagcgcgccgctcgcggtctgccgcagcagccgattgaccaaaatctactggatgcgctggccgccggtctaccggattgttccggcgtggcgctgggtgttgatcgtctggtgatgctggcgctgggagcagaaagcctggcggacgtgattgcttttacggtcgatcgggcgtaaatctgaaattcactctttcgcgagataaaatggcgcaataagcgccattttgtagcatattttttcaattatcctctgtttgccacaacataaggctggagctttgatgccatttaggtatcaatcctgtgttgatttttttatcgctgaccttcgtaaaaaagaaggcggcgtcaatcggtgagcggcgtctggcaaacgcgctcgagcgtaagggatggttgaatgacccacacgataaaaaagatgagccttattgggcttatcctgatgatttttacttctgtttttggttttgcgaatagcccgtcggcgttttatttaatggggtatagcgcaatcccatggtatatattttctgccttgctgttttttattccattcgccttaatgatggctgaaatgggttccgcttatcgcaaagaagagggcgggatctattcgtggatgaataatagcgtggggccacgttacgcgtttattggcacgtttatgtggttttcatcgtatgtcatatggatggtaagtacggcggcaaaaatttgggtaccgttttctacttttgtttttggcgccgatatgacgcagcactggcgtattgcagggcttgagcctacgcaggttgtcgggctgctcgccgtcggctggatgattctggtgacgtgtgtcgccgccagagggatcaataaaattgcgcgaattacggcggtcggaggtattgccgtaatgtgtcttaatttagttttattgttagtgagtgtcgctattttgttattaaatggtgggcattttgcacaagaaattaattttacctcgtcaccgaatccgggttatcactccggcctggcaatgttgtcatttgtggtatttgctatttttgcgtacggcggtattgaggctgtcggcggactggtggataaaaccgagaaaccggaaaagaattttgcgaaaggtattgttttcgcggctattgtgatttcaattggttattctttggcgatctttttatggggcgtcagcactaactggcaacagatattaagtaatagcgccgttaacttagggaatatcacctacattctgatgtcgagtttaggcacgacattaggtaacgcgttaaacctttctccggaagcagcgatgacggtgggcgtctggtttgcgcgtatcaccggcctttctatgtttctggcttataccggcgcgttttttacgttgagctattcaccgctgaaagccattattcaggggacgccaaaagcgttgtggcccgcgccgatgacgacactgaacgctaacggtatgccggcgaccgctatgtggctacagtgcgtgctggtgagtctgtttattttgctggtctcttttggcggtgacaccgcatcggcgttttataacaaactcacgctgatggcgaacgtctcaatgaccttgccatacctgttccttgcgctggcatttcccttctttaaagcgcgtcaggatctggagcggccatttgttctctttaaaaccaaagcctctaccctggtcgcgacgggtgttgtggtgctggtggtgacgtttgccaacgtctttaccatcatccagccagtgattgaagctggggactgggacagcgccttgtggatgatcggcggcccgatcttcttctcgctgctggcgatggcgatttatcagaattacagtagccgcatgagcgccgatccggagtgggcggcggagtaatctttgtccggatagcgttagctcatcggctttatgaaaaggatatttataatgagtccgaaaatgtttgcgttgtgcgctatctggattttactggctatcccactcatcgctgtattttcagtcctggataaagagtggatgattggcgagagtgggataaccaacatttgtgatgtgatgagaactgtcgaaaatgatgattccagaagttttggcgcgatgatgacgctgcccctgtttttcccatttttttacgttactgtgtataagaaaatacgtagttggtttttgtactgtgtcgcgttggtgatatttgcttactggtcctggcaattcttcctgcgctatcagttttgtgtgtgatctatgctaaaagacctgataagcctatgtcatcgagtcttttagcgtcatccggcgccattgcgtttacaaactccccgccgggcggctggttttacccgctgacgttaacgttctccccgtttgtttaccgccgaggctctccagacgcatctggaacggcgggaacggcatatcaataccgtgttcgcggaagccagccagaatcaattggtggatctcatggcgtaatggcatacggtgtcccatttccgcggcatagatacgcagttcgaaaatctgaataccctgctggagatccaccagaaagatttcaggcggcgggttatcaagcaccaaagaacagcgctgcgccgccgtcagcagaatttgcgtcacctcttcgctattggcatccgctggcgccgggatggttaacaccacgcgcgtaacggagtcagacagcgaccagttgataaactgttcggtgataaaggctttattcggcacgataatctctttacgatcccagtcactgatagtggtggcgcgggtattgattttggtcacgctgccggtgagatcgcgaatggtcaccgtatcgccgatacgaatcggcttttcaaacaaaataatcaggccggagataaagttagcgaaaatttcttgcaggccaaaaccaagcccaacgccgagcgcggccaccagccattgtagcttcgaccactcaatgccgatcatcgagaaaccgaccagcccgccaatcagcattaacagatatttggtgatggtcgtgatggcgtaaccggtaccaggcgttaaatcgagatgctgtaataacgccagttccagcagcgcaggcagattacgcaccaactgcgtggtgatgataaagaccagaatcgcaatgagcaccgcccccagagtaattggctccaagctttccacgccttgcaccgtagaggtgacatcccacagcgaaatattctccaggaagccgaatgccgagtggatttccgaccacagtacaattaccgatagcagggcgataagcatcagaattgagcggaccagacgcagcgactgggcgctaatagcgtcaagatcgatttcactttcatcgatgtcgaccgcgccttccaggctggaggagtgcgccggttcttcttcgccgcgcgcgcgctgcgccagcatttccgcccgacgatgtttggcgcggtcaaaagccagtcggcgtcgttggatcagcatccagcggcgaatgacatgataaataaccagcaacaggaaccagatggcgaccgaggtttccagtctcgccagtagcgcctgcgctgtggccagataacccaccgccgccgccagaatcgcgataagcggcgcgcccatcaacatattccacagcaggctgttgaccatgttgtcgccgttgccttctttatcaagatagagcggaatgcccgcttttttcagactcagcgtgaccagcgccagcgcgccgcatatcaggatgaagcaaaggcggcccaacgagccggaaaactcccgatcgttaagattatcaaacatgatcactgccataatgagcggcacgatcagcccaatgctcatcaggtagtagcgcatcgctttcgctacccggtttcgcggccagccgaaatgcgccacaaacagaccattagggcgggcaaaagcggcgcaaatcatgactacccacaacagcggtactgtcgccgtcacgccatcgccgatggcgacggccagcggatacggccaggcttcctgtagaccatagccgagcgtcgcccacaagacgggcagcggcgaggcgaccagaatcgaccagaacaccgttcgcagcgtcagcgagaagtgatcctgggtgactttcccgacgcgcgaggccgagcgttcaaggaaccggttgaagtgttgacgtgaatagaggctaaacccgaccagcgccagcgcgccgaataacggcagtagcgtctctttgctggtcagcatcatgatgctggctttacctaactgattaaacgtatctaatgagataagccgacgtaaatcctgaaccaaatcaacaggccaggagagcgatagcgggctaacgtcagcggtccagaacagataacggtgggtcgcttcattaacctctttaagcgcatcctccagttggctgttggagactttcagtttggtcagctccaggatcagcgtgtcgccgccctgtaacaacgagttgagcagctcgcgctgagtgcgaagctgggcgtcaagaatctggttttgctcggcggtcagcggctgtccattggcctgacgtatttgccgtagctgcggctgcttattgagtaactcttcatagcgcatacggtggacgcgtagctgcgccatttccgtatcaagctgctgcggcttaggcatctctggcagacgggcgacctgcgcgcgcagcgcttcgccaagcatgttggacacgccaagccattgcgactgctcccgcagcgtattgagcgcctgacgcacctgtaacgtttggctggtggcctgtcgctgctgcgaggcgaccagatccatccgctgcgcttgttgattaagcgcctgtgacagctcgcggttgactttaaattgttcgacgatgccttccggcaaaccggcgctgttttccgccagcagctcagtactttccagcgcgcgttccgcttcacgttgacgcaggctgttgagctgattgcgcagcgcctgaagatacgcatccaattgctgactctgtttttccgccagctcggaacgcagacgagccagttcctgccggttgttggcggacagttgcgccaactccagttcgtcgactaacgcttttagtttggcggactccgcctgcatactgagactttgcgcctggctaagcgcggcacttccgcctgcggcgccgagtcgtcgctcaatctcattaagctggcggcgggcgtcgttttgctgttggggaagctggctgagcgagtcggcgatctccctgacgcgctcctgctcctgttgcgcctcgcgggttttatctagtagctggctgctaacctgcaagatctcctgatttaacgcttcggtggacatctctggcggtacgctgcgaggttcatcgcgcagattattcaactgggcgcgcaaggtggcggatagcttagggaaattatcaataacgtgttgatattgtttcgcgcgctcaagcgagccttttcgctcttcaagcgcgtttaacgcagtctggagcgcctcaacggcttccggctgagcgggcttcgccgcttttgcctgctccagttcctgcgtgatttgtttggcgtcgggggccgttgcggcgaacgcccccgtgctgaggcaccaggccatcagaaaagcgataatcaggcgcacgtcagcattctctcttgattaggtgtcgtcttttttattgtcaaccagcgggctggcgtcgtgttcggctttaatttcttctgccggcagcggagcaggttctacctccggcgcgacgaatgtttcggtcgacgtcgccagcggttggccaattttggtaacggacaggcttgccagcgacgcgatcagattcacttttcccggcgcaaataagttgatgaccgtggaacccagtttaaagcgtcccatctcctggcctttcaacagggcgacagacccttcatgttcgccttctggccaggtccagcgcttgatgatgccttcgcgcggcggggtaatggtccccgcccagacggtttcgatactgccgacaatagttgcgccgaccagaatctgcgccatagggccgaactcggtatcaaacaggcagataacgcgctcgttgcgggcaaacaggttggggacgttttgcgcggtcagatggttaacggagaacagatcgcccggtacgtagatcatttcacgcaggatgccgttgcatggcatatgcacgcgatggtagtcgcgaggggagaggtaagtggtcacaaacgtgccgttgcggaacttatccgccatcaggtagttacccgccagcaacgcctcaaggctgtaattatggcctttggcctgcaaaattttatcttcttcgatacgacccaactggcttatcacgccgtcggcaggcatcaccaggatgttaggatcggtattgagcggacgcacgtcatcacgcagcggacgaacaaagaaatcattgaacgtacgatagctggcggtatccggtttttgcgcctcggtcatatcgactttgtaatactttacgaagagatcgataaccagttttgtcagccatcctgctcgtttgcttgcgccccagcccgccaggcgagtgagccatagtttcggcagaatgtattgtagcgaaagtttaaatgagtttaacaaggtagcctccaggccattgttgttcctgaaccggcagttataccggtatcctgaaaaaaggggacgattctaacgacgcctagcgtatctgtcagtcgtccgtatcagaaaagtttttacgcgtttttacctgcgccatactttcaagaattcggtgataattttcgaaacgggtttccgcaatagcgccgttctctaccgcttcgcgaatggcgcagcctggatcggcgtcatgcttgcagtcccggtatttgcaatgtcccaaatagtcatgaaattcgacaaagccctgggtgatttgttccggctccagatgccataagccgaactcgcgcacgccgggggaatcaatgacatcgccgccatgcgggaaatgatacagacgagcagcggtagtggtatgttgacccagaccggagacattcgacacatcgttcgtcagaatctcgttctgtaagccgagcagagcgtttagcagactggattttccgacgccggactgcccagcaaaaatactgatgcgaccggttaacgcctcttccagcggtttcagaccatcctgcgtatggctggagaccatcagcacgcgatagccgatattgcggtagatatccatctgctcattaacgaagtccataccttcgtcgtccagcagatcaattttattgagtacgataagcggctcaacctgtagggtttcacagccgaccagatagcgatcgatgatattcagcgacagctccggcaaaatcgcggagacgataacgatttggtcaatgttggcggcaataggcttcacgccgtcgtagaagtccgggcgcgtcaataccgaggtgcgctcatgcaccgcttcaacgatgccttttacgttgacgccctttgcggcggctttgcccggacgccagacgacgcgatcgcccgtcaccagcgaacggatagtgcggcggatattgcaacggtgaacctcgccgtcagcagactccacatcggcatgcataccaaaacggctaatgacgataccttctgcaggctcgccaaacaggttgtcatcgtagtcggctttctccgcggacgtttttaaacgacgctggtgattggcgttcacacggcgctgctggcctttggagagtttatttttgctcaatcgtactggctcctggtcgcccatagtgggcaaaacatctatgatacacgcaattgtagatgaatatagtcacagtgaatgtgacctctgaagggtggaaaatagcatgagtgccgatgaaaacaacctgatttggatcgatctggagatgacaggtctggaccccgagcgcgatcgcattattgagatagccacactggtgacggatgccagcctgaacattctggcggaagggccgacgattgcggtacatcaatccgatgcgcaactggcgttaatggatgactggaacgtgcgcacccataccggtagcggcctggtagatcgcgttaaggcaagtacgatgggcgaacgagatgctgaactggcgacgattgaatttctgaaaacgtgggtgcctgcgggtaagtcgccgatttgcggtaacagcatcggtcaggatcgtcgttttctgtttaaatatatgccggaactggaggcctacttccactatcgctatctggatgtcagtacgctcaaggaactggcgcgccgctggaagccggagattctggccggctttaccaagcagggcacgcaccaggcgatggatgatattcgcgagtcggtggcggagctggcttactaccgcgagcatttcattaagctgtgaggcgtaacatgccggatggcaacgccagagcgtctcatccggcagctctccccacactgaattactgcgtaaaccatttctcctgcatctgcgcatattccggcgacgctttcaccttgtcgagcgcggcattaatttcttgcaatagcgcgtcgttgtctttgcgtaccgcaatgcctaacccttttccgtagtagtcaggatcgctggcgcgttcatccatgatggcgtaatccggattgttttttagccacttaccaatcgcggcgacatcgccaaacacgccctcaagacggttgtttttcagatcggtaaaggcgtttagatagctgtcataggcgacaggcgtgatagcttgttgtttatcctgcaaatagcgctgatgcgttgtaccgttttccagaccgacttttttgcctttcagatcggcaaaagtgtgataagcccctttacgcgtgacgactaccgccgatagaccttcgtaatagggttggctaaaggagacctgctgctcacgtttgggcgtcatatccataccggcgatcaccgcatcaaactttttgaagcgtaggctggggatcagactatcaaagctctggttagtgaatgagcactccgcttgcatctctttgcagaccgcgttggcgacatcaatatcgaaaccaacaattttattatcggcatcgacaaactcatagggcgcataggtggcggaggtgccaaaatgtaatgttctggcggaaacggaagcggcgtgaacggagaggctggctaacagcatgacaataagtttttttttcatcttgatccctgatatcaattggatgttgtggtcaccgtgctattctttttttggcgcagggtgctattctgattctgtgcctttaggcgtggcgtgaaaagttttttgttgcatagcgcacgctttgctcgttttttgtcttgtttggtgatttaatcagcattcaaacaaaaatcgcgaaaaaatgcgttcaggggcttgcagctaaatggatttctcgtataatgcgcctcccgtaacgacgcagaaatgcgaattacgacagcaacaaatttgcgggaatagctcagttggtagagcacgaccttgccaaggtcggggtcgcgagttcgagtctcgtttcccgctccaaaatttgaaagtgcttgttaagcacagaccaccaatcgcaggatttcgaattgcgacaaggcggcaactgaatgagttctcaggagcttactgaagtaagtgactcaggcgagtgaaggcagccaacgcagtagcggttcgaaagacgaagattatgcgggaatagctcagttggtagagcacgaccttgccaaggtcggggtcgcgagttcgagtctcgtttcccgctccaattcttatctacagtaaaattatccacaacgaatatcgcgttggggcacgttttgttccgctttcgtcagatccttgtaaacagacttatccacagggcggcccattactcctggaatgcaaaaaattatacctgacgcgtagaatttctataatttactgaaaaatatagaaaaaataagatttcaaaacgttagttttattgactattccttttttccctcttgaatcgcaatgtgtttttatttttatacacagcctgtgaataattcaggcatcgcgcaccagccctttttcaatcaccctgaccagacgctgttttttcggtagctgcacttcaatgatgcaggcgttgcgcttttcaatttgttgcgcaatcgcccattcgatatgctcatcgagaagtggatgctcacccttgcggctttccagcgccgtaatgacggcattactccacggcgcattccccagcgcgacggcaacattgcgcagccagcgtaaatgaccaatgcgccgaatcgcagaaccttcagtgactttcagaaactgcgcttcgctccagctaaacaactcaagcaaatctggattatgcagcgccttgcgtgggctaaaatctgcttcgtcggtcaactgagagtaacgattccacggacagataagctggcagtcatcgcagccgtaaatacggttacctatcagtgggcgaaatgcttccggaatagcgccttccagctcaatggtgagataagaaatacagcgccgcgcgtccaccgtatacggttcgacgatcgccccggtcgggcaaatggtcatacaggcgacgcatttaccgcaaccttcctcgaccggctggtcgaccggcagcggtaaatcaatcagcaattcccccaggaaaaagaatgagcccgcctcccgattaaggataagtgagtgcttacccgtccagccaagtccggctttttccgctaatgggcgttcaagaataggcgcagagtcgacaaacggtctaaaattcagcgaaccgcagtactgctggatctgctcgcccagttttttaaggcggctgcgtaatagcttgtgataatcacgccccagcgcatatcggctaacgtagcccagcgtgggatccttcaacgtactggcaaacgcggcgttggcgggcagatagttcatgcgcacgctgatgacacgtagcgtaccgggtaagagttcatgaggccgggcgcgcatcataccgtggcgcgccatccatgccatctcgccgtggtattgtttgtccagccacgcctgcagcgcaggttcggatgcgcgcagatcggtatcagtaataccgacctgctgaaagcccagctccagcccccactgcttaatattttgcgctaactgattgagatcgaggggctttgacatgatggaccataacatgaagaaaaaccctgtaagtataccacactccatttggcccgccgatgacatcaaacggctggaacgcgatgcggcggatgccttcggactcacactctatgaattgatgctgcgcgctggcgacgcggcatttcgggtagcccgtgacagttatcctgacacccgacactggctggtgttgtgtggtcatggcaacaacggcggcgatggttacgtcgtggcgcgactagcgcaagcggcgggcattagcgtaacgttgctggcgcaggagagcgacaaaccgttgcctgaagaagcggcgcaggcgcgcgatgcctggctgaatgccggcggcatcatccatgctgccgatattatctggccggaagcgacggatctgattatcgacgcgctgcttggcaccggcatagcccaggcaccgcgcgacccggtagccggtctgattgaacaggcgaacgcccatcctgcgccggttgtcgccgtcgatatcccgtcaggtctgctggcgcaaacgggcgccacgcctggcgcggtgataagcgccgcgcatacggtcacgtttatcgccctgaaaccaggcctgctgaccggcaaagcgcgtgacgttaccggcatattgcattatgacgcgttgggactggaaggctggctggcgagccagacgccgccgctccggcgttttgacgcgacgcagttggggcaatggctaacgccgcgtcgaccgacctcgcataagggcgatcatggtcgtctggcgattattggcggcgaccagggaacagcgggcgcaattcggatggctggcgaggcggcgctgcgtacgggggctgggttggtcagagtactgactcgcggtgaaaacatcgcgccgttgctgacggcccgcccggaactgatggtacatgaactcacgcctcagtcgctggaagagagcctgacctgggctgacgttgtggtgatcggcccggggcttggacagcaggaatggggcaaaaaagccttacagaaagtagaaaacgtccgtaaacctatgctgtgggatgcggatgcgttgaacctactggcaatcaatcctgataaacgtcacaatcgcgtgattacgccgcatccgggagaggcggcccgcctgttaggatgttctgtggcagaaattgaaagtgatcgcttactttcagcacagcgtctggtaaaacggtatggaggcgtggtcgtgttaaaaggcgcaggaacgattatcgccgctgaacaccaccctctggctatcattgacgctggtaatgcggggatggcgagcggcgggatgggcgatgtcctgtccggcatcatcggtgcattgctcggacagaagtttaccccgtatgatgcggcatgtgtgggatgtgtggctcacggcgcggcggcggacttactggcagcgcgttatggcgctcgcggcatgttggcgaccgatctttttactacgctgcggcgtattgttaaccctgatgtgattgacgtaaaccatgatgaatcgagtaattccgctacctgacgaacaggcgacgctagacctggggcaacgggtagccaacgcctgcgatggcgcgaccgttatttatctgtatggcgatttaggtgccggtaaaacgacgtttagccggggatttttacaggcgttaggccataacggtaatgtaaaaagccccacctatacgctggtagagccttatgcgattgataacatgatggtatatcacttcgacttataccgtcttgcggacccggaggagctggagtttatgggcattcgcgattatttcgccaacgacgccatttgtctggttgagtggccgcaacaaggtaaaggcgttctccccgacccggacgtcgaaatccatattgattaccaggcgcaggggcgtgaggctcgcgtaagcgcggtatcctcatcgggtcattcgttactggcgcgtttagccgattagctataaaggtggcgggatgatttatcgcatcaaaaatgccgtaatagcagccttaatcctgctgtgcgcgcaggcgggcgccgccagtctctctgatattcaggtgtccaacggcgagcagcaggcgcgcattacgctgagttttatcggcgagccggaatatgcttactcacaggacggtaaacggactgtggcgctggatatcaggcagaccggcgtgattcaggggctgccgcttcagtttagcggtaacaatctggtaaaaacgatccgtgctggaacgccgaaagatgcgcaatctttacggttgcttgtcgatctgacggaaaatggtaaaaccgaggcggtgaagcggcaaaacggcggcaactatacggtcattttcaccattaatgccgatgttccgccgccaccgccgcctgtcgtcgcgaaacgggttgaaagcgcgcctcgcccgacggagccggcccgtaatccgtttaaatcttctgatgatcgcctgaccggcgtaaccagcagcaataccgttacgcggcctgcggcgcgcgcgtcggcaggcgctggcgataaagtggtgattgctattgatgccggacatggaggccaggaccccggcgcgataggcccgggcggtacgcgcgagaaaaatgtcaccatcgccatcgcgcgtaagttacgcacattactgaataacgatccgatgtttaaaggcgtgctgacgcgtgacggcgactattttatttcggtgatggggcggtctgatgtggcgcgtaagcaaaacgccaactttcttgtctctattcatgcggatgccgcgccaaatcgcgacgccaccggcgcctccgtctgggtattgtccaatcgtcgcgcgaacagcgaaatggcaaactggcttgagcagcatgagaagcaatccgaactgttaggcggcgctggcgatgtgctggcgaacagtcagtcagacccttacctgagccaggcggtactggatttgcaattcggtcattcgcagcgggtagggtatgatgtggcgacgaacgtactaagccaactcgacggcgtggggtcgctgcataaacgccgcccggaacacgctagcctgggcgtgttgcgttcgccggatatcccgtccattttggtggagacgggctttatcagtaatcacggcgaagagcgattgctggcgagcgaccgctatcagcagcagattgctgacgctatataccgggggttgcgtaagtactttgcagcgcatccgatccagtctgcgccgcagggcggcccaggccagacggccagtaccaaccagcctggcgccataaccgccgcgaattaaggagatttcatgccgattcaggttctgccgccgcagcttgcgaaccaaatcgccgctggcgaagtggtggaacgccctgcgtcggttgttaaagagctggtagagaatagtctggatgcaggcgccacccgcgttgatatcgacatcgagcgtggcggcgcgaagcttattcgtattcgcgacaatggctgcggcattaaaaaagaggagctggcgctggcgctggcccgtcatgccaccagtaaaatcgcctcgcttgacgatctggaagcgattatcagtctgggatttcgcggcgaagcgctggccagtatcagttcggtctcgcgtttgacgctaacgtcgcgcacggcggagcaggcggaagcctggcaggcgtatgcggaagggcgcgatatggacgtgacggtaaaacccgccgcgcacccggtcggcaccaccctggaagttctggatctcttttacaatacgcccgcccggcgcaaattcatgcgtaccgaaaaaacggaatttaatcacatcgatgagatcatccgtcgtattgcattggcccgttttgacgtcacgcttaacctgtcgcacaacggcaaattggtacggcagtatcgcgctgtcgcaaaggacgggcaaaaagagcgccggttaggcgccatctgcggcacgccgtttctcgaacaggcactggcgatcgagtggcagcatggcgatctgaccctgcgcggctgggtcgccgatccgaatcacaccaccacggcgttaacggagatccagtactgttatgtgaatggccgcatgatgcgcgaccgcttgatcaaccatgccattcgccaggcctgtgaagataaactgggcgcggaccaacagcctgcgtttgtgctgtatctggagattgacccgcatcaggtggatgtcaatgttcatcccgccaagcacgaagtgcgttttcatcaatcccggctggtgcacgacttcatctatcaaggggtgctgagcgttctgcaacagcagacggaaacggcgctgccgctggaggagattgcgccagcgccgcggcatgtcccggaaaaccgtatcgccgccgggcgcaaccattttgctgtacccgccgagccaactgcggcgcgcgagcccgcgacaccgcgttattccggcggcgcatcgggcggtaacggcgggcgtcagtccgcaggtggttggccgcacgcgcagccaggttatcagaagcagcagggcgaggtttatcgcacgcttttacagacgccgacggcgagccccgcgccggagtcggttacgcctgcgcttgacggacatagccagagtttcggtcgcgtactgacaatagtcggcggtgactgcgcgttgctggaacacgcggggactatccagctcttgtcgctaccggttgcggagcgttggctgcgtcaggcgcagcttacaccgggtcaaagtccggtttgcgcgcagccgttgctgattccgctgcgtttaaaagtgagcgccgatgaaaaagccgcgctgcaaaaagcccaatctttgttgggagaattgggtattgaatttcagtcagatgcgcagcatgtgaccattcgggcggtgcctttacccttacgacaacaaaatttacaaatcttgattcctgaactgataggctacctggcgcaacagaccacatttgcaacggtcaatattgcacaatggatagcgcgtaatgtgcagagcgaacatccgcagtggtcgatggcgcaggccatatcgctgctggcggatgttgagcggctatgtccgcagctggtaaaagcgccgccgggtggcctgttacaacctgttgatttacattcggcgatgaacgccctgaagcatgaatgatgtaagcaaggcgagcctgcctaaggcgatatttttgatggggccgacggcctccggcaaaacggcgctggcgatagaactgcgtaaagttttgccagtagagttgataagcgttgattccgccctcatttatcggggaatggatattggcacggctaagccgaatgccgatgagctgaaagcggcgccgcatcgactgttggatatacgcgacccgtcgcaggcgtattcggcggcggattttcgccgcgacgcgttagcgcaaatggcggagatcaccgctgcggggcgtatcccgctgttagtgggcggtaccatgctgtattttaaggcattgctggaagggttatcgccgctgccttcagcagatccggaagtcagatcccggatagagcagcaagcagcggagctaggatgggaggcgttgcatcagcaacttcaggagatagatccggttgccgccgcgcgaattcatccaaatgatccgcaaagactttcccgggcactggaagtttttttcatttcgggtaaaactttaacggagctaacgcaaacgtcaggagacgcgctaccgtaccaggtgcatcagttcgctatcgccccggcgagccgtgaactgctccatcagcgcattgaactgcgttttcatcagatgttggcttcaggttttgaagcagaagtccgggcgctttttgcccgaggagatttgcatacggacttgccttccatccgttgtgtgggataccgccagatgtggtcatacattgagggcgaaatctcatatgatgaaatggtttatagaggtgtttgcgccacgagacagttggcgaagcgccagatgacctggttgcgcggttgggaaggggtgcgctggcttgacagtgagaatcccgatcgggcgcgaaaagaagtattacaggttgttggtgctatcgcagactgaatgtgtacaattgagacgtatcgtgcgcaatttttcagaatcgaaaggttcaaagtacaaataagcatataaggaaaagagaatggctaaggggcaatctttacaagatccgttcctgaacgcattgcgtcgggaacgtgttccagtttctatttatttggtgaatggtattaagctgcaaggtcaaatcgagtcctttgatcagttcgtgatcctgttgaagaacacggtcagccagatggtttataagcacgcgatttctactgttgtcccgtctcgcccggtttcccatcacagcaacaatgccggtggcggcgccagcaataactaccatcacggtagcaacgcgcaggggtctactgcgcaacaggacagcgaagagactgaataagttcacgcgctgtttatccatgtcgggggcgtcggataatcgcccccgctggttattaagagggtttacgcttgtttgaccgttatgatgccggtgagcaggcggtactggtacacatctatttttcgcaagacaaagatatggaagacctccaggagtttgaatctctggtctcttccgccggtgtcgaagcaatgcaggtgattaccggtagccgtaaagcaccgcacccgaagtactttgtaggtgaaggtaaggcagttgaaattgcggaagccgtgaaagcgactggcgcagcggtcgtattgtttgatcatgcattgagtccagcccaggagcgaaacctggagcgtttgtgcgagtgccgggttatcgatcgcaccggtcttatcttagatatttttgcccaacgtgcgcgtacccatgaaggtaagttgcaggttgagctggcgcagctacgccatctggctacgcgtctggtgcgtggctggacccaccttgaacgtcagaaaggcgggattggtttgcgcggtccgggtgaaacccagctcgaaaccgaccgtcgtttactgcgtaatcgcattgtgcagattcagtcgcgcctggagaaagttgagaagcaacgtgagcaggggcggcagtcgcgcatcaaggccgacgttccgacggtatcgctggtgggctataccaacgccggaaaatccaccctttttaatcagatcactgaagcgcgggtctatgcggcagatcagctatttgcgacgctggaccccacattacgtcgtattgatgtagcggatgtcggtgaaaccgttctggcggatacggtaggctttatccgccatttaccgcacgatctggtggctgcctttaaagctaccctgcaggagacgcgtcaggcgacgctgctgctgcatgtggtcgatgcggcggatgttcgtgtgcaggaaaacatcgaggcggtaaacaccgttcttgaagagattgacgctcacgaaatccccaccttaatggtgatgaacaaaatcgatatgctggacgactttgaaccgcgtatcgacagagatgaagagaataaacccatccgcgtttggctttcagcgcaaagcggcgtgggaataccacagctttttcaggctttgacggagcgtctttccggcgaggtggcgcagcatacgctgcgtttgccgccgcaggaagggcgtctgagaagccggttttatcagcttcaggcaatagaaaaagagtggatggaggaagacggtagcgtcagtctgcaggtacgaatgccgattgtcgactggcgtcgcctctgtaaacaagaaccggcgttgatcgaatacgtgatctagacgcgaagtcattcaggtcgtattgaggcggtagctgagagaatctcaggagctcacaacgaagtgacctggggtaaaaaagccgccactcaagacgcagcctgaaagatgatgtctgtaacggcggttcgtctgaagcatggagtaatttcgccttatcctctgaggtcgaaagacaacggggatcaccgcataacaaatatggagcacaaacatggcgtggaatcagcccggtaataacggacaggaccgcgacccgtggggaagcagcaaacctggcagcaactctgggggaaatggaaacaaaggtggccgcgatcagggacctcccgatctggatgatatcttccgtaagctgagtaaaaaactcggtggttttgggggcggtaaaggcaccggttccggcggcggtagctcatcgcaaggcccacgtccgcaactgggaggccgtattgtcgccatcgccgcggcggcagtagtcattatctgggcggccagcggtttttataccattaaagaagccgagcgcggcgttgtgacgcgttttggtaaattcagccatctggtagagccaggtctgaactggaagccgacatttattgacgacgtcacgccggtgaacgtcgaagcggtgcgcgaactggcggcgtcaggcgtgatgctgacgtctgatgaaaacgtcgtgcgcgttgaaatgaacgtgcaataccgcgtcaccgatccgcagaaatatctgtttagcgtgaccagcccggacgatagcctgcgtcaggccaccgacagcgcgctgcgtggcgtcattggtaaatacacgatggatcgcatcctgaccgaaggtcgtaccgttattcgtagcgatacccaacgcgagctggaagagactatcaaaccgtacaacatggggattaccctgctggacgtgaacttccaggctgcgcgcccgccggaagaggtgaaagccgcctttgacgacgcgattgccgcacgtgaaaacgagcagcagtacattcgtgaagcggaagcgtataccaacgaagttcagccgcgcgccaacggtcaggcgcagcgtattctggaagaggcacgcgcctataaaacccagactatcctggaagcgcagggtgaagtcgcccggtttgcgaagattttgccggaatataaagccgcgccgcagattacacgcgagcgtctgtatattgaaacgatggaaaaagtgctgagccatacccgtaaagtactggttaacgacaagagcggtaatttaatggtgctgccgttagatcagatgctgaaaggcgggaatgcgccggcggcaaagagcgacaatagcgccagcaacctgctgcgcctgccgccgtccacaaagtctaacgccagcggagcaagcaacacgtcgtcctcaaatcagggcgatattatggaccaacgccgcgcgaatgcgcagcgtaacgactaccagcgtcagggggaataacgatgcgtaagtcagttattgcgattatcatcatcgtgctggtagtgctctacatgtccgtctttgtggtcaaagagggcgagcgcggcattacgctgcgttttggtaaagttctgcgtgacgatgagaacaaaccgctggtttacgcgccgggtctgcactttaagatcccgtttattgaatcagtgaaaatgcttgatgcgcgtatccagacgatggataaccaggccgatcgctttgtgactaaagagaagaaagacctgattgtcgactcctacatcaaatggcgtatcagcgactttagccgttactatctggcgaccggcggcggcgatatttcgcaagccgaagtgctgttaaaacgtaagttctcggaccgtttgcgttctgagattggtcgcctggacgtaaaagacatcgtgaccgattctcgtggtcgtctgactctggaggtgcgcgacgcgctgaactccggttcagccggtaccgatgatgaagtagcgaccccggcggcggatgacgcgattgccgaagcggcggaacgcgtcacggcggaaaccaaaggtaaagtaccggtcatcaacccgaacagtatggcggcgttgggtatcgaagtggtcgatgtgcgtattaagcagatcaacctgccgaccgaggtttctgaggcgatttacaaccgtatgcgcgccgagcgtgaagcggtcgcgcgtcgtcatcgctcacaaggtcaggaagaagcggaaaaactgcgtgcggctgctgactatgaggtgacgaaaactctggcggaagccgagcgtcaggggcgtatcatgcgtggtgaaggtgatgctgaagccgcgaagctgtttgccgacgcgttcagccaggaccctgatttctacgcgttcattcgtagtctgcgcgcttacgagaagagcttcgaaggtaatcaggacgtgatggtactgagcccggacagcgatttcttccgctacatgaagacaccgagttcgacgacacgctaaaatagcgtcagcggttttagaccagcaaaaccaccgcatccaaaggatgccggtggttttcttttataagggcgataaatgaattcaacaatctggttggcgcttgctctggtattagtcctcgaagggctgggaccgatgctgtatcccggcgcatggaaaaaaatggtttcggcactggcgcaactgccggaaaatgttttacgtcgttttggcggcggacttgtggtcgcgggagttgtggtctactacatgttgaggaaaacgattggctgagcaaaaagtggtcggatttgccgcagattgagtgcaaaaagtgctgtatatctgaaaaagcgatggtagaatccatttttaagcaaacggtgattttgaaaaatgggtaacaacgtcgtcgtactgggcacccaatggggtgacgaaggtaaaggaaagatcgtcgatcttctgactgaacgggctaaatatgttgtacgctaccagggcggtcacaacgcaggccatactctcgtaatcaacggtgaaaaaccgttctccatcttattccatcaggtattcttcgcgagaatgtaaccagcatcatcggtaacggtgttgtgctgtctccgagcgcgctgatgaaagagatgaaagaactggaagaccgtggcatccccgttcgtgagcgtctgctgctgtctgaagcctgtccgctgatccttgattatcacgttgcgctggataacgcgcgtgagaaagcgcgtggcgcgaaagcgatcggcaccaccgggcgtggaatcgggcctgcttatgaagataaagtggcacgtcgcggtctgcgtgttggtgaccttttcgacaaagaaaccttcgctgaaaaactgaaagaagtgatggaatatcacaacttccagttggttaactactacaaagctgaagcggttgattaccagaaagttctggatgatacgatggctgttgccgacatcctgacttctatggttgttgacgtttcggacctgctcgaccaggcgcgtcagcgtggcgatttcgtcatgtttgaaggtgcgcagggtaccctgctggatatcgaccacggtacttatccgtacgtaacttcttctaacaccactgcaggtggcgtggcgaccggttccggcctgggcccgcgttatgttgattacgttctgggtatcctcaaagcttactccactcgcgtaggtgcgggtccgttcccgaccgaactgtttgatgaaaccggcgagttcctctgcaagcagggtaacgaatatggcgctactaccggccgtcgtcgtcgtaccggctggctggacaccgttgccgttcgtcgtgcggtacagctgaactccctgtctggcttctgcctgaccaaactggacgtgctggatggcctgaaagaggtgaaactctgcgtggcttaccgtatgccggatggtcgcgaagtgactaccactccgctggcagctgacgactggaaaggtgtagagccgatttacgaaaccatgccgggctggtctgaatccaccttcggcgtgaaagatcgtagcggtctgccgcaggcggcgctgaactacatcaagcgtattgaagaactgaccggcgtgccgattgatattatttctaccggccccgatcgtactgagacgatgattctgcgcgacccgttcgacgcgtaaatctggtacgcctggcagatattttgcttgccgggctaacagtgtgatacattgctgtgtcgggtaagccattacgctatccgacacagtgttaaatcctcgcttttttccttccccgaactgaaataaattagcgacacagcttgtggctggtttatcatcaatataaatgtatttttcccgttttcccttttcctgaggttgatgtgcagttaacgagtttcaccgattacggcttacgtgcgctaatctatatggcgtcgttaccagatggacgaatgaccagcatttctgaggtgacagaagtctacggcgtgtcccgtaatcatatggtcaaaattatcaatcagcttagccgggcgggctttgtcaccgccgttcggggaaaaaatggcggtatccgcctgggtaaaccggctaatactatttgtattggcgatgtggtgcgtgagctggaacccttatcactggtcaactgtagcagcgaattttgccacatcacccctgcctgtcgtctgaaacaggcgctttctaaggccgtgcagagttttctcaaggagctggataactacacgcttgccgatttggttgaagagaatcaaccgctttataaattattactggtggagtgaagtaaacttcattagagatgacaatggaggaacctcaatgtcacaagatcctttccaggaacgcgaagcagaaaaatacgcgaatcctatcccgagccgggaatttatcctcgaacatttaacgaaacgtgaaaaaccggccagtcgcgaagaactggccgtagaactgaatattgaaggcgaagagcagcttgaagccttgcgtcgccgcctgcgcgcgatggagcgcgacggacaactggtctttacccgccgccagtgctatgcgctgccggaacgcctcgacctgctgaaaggcaccgtgatcggtcatcgtgatggttacggtttcttacgtgtcgaaggccgcaaagacgatctgtatctttccagcgagcaaatgaaaacctgtattcatggcgatcaggtgctggcgcagccgctgggcgccgatcgtaaaggtcgccgcgaagcgcgtatcgtccgtgtactggtaccgaaaaccagtcagatagtcgggcgttatttcaccgatgcgggcgtcggctttgtggtgccggacgacagccgcctaagcttcgacattcttatcccgccagaagacgtcatgggcgcgcggatggggttcgtggtcgtggttgaactgacccaacgtccaactcgccgtactaaagcggtagggaaaatcgtcgaagtgctgggcgacaatatgggcaccggtatggcggttgatatggcgctgcgtacccatgaaataccttacatctggccgcaggcggtagagcagcaggtcgccgggctgaaagaagaggtgccggaagaggcgaaagtcggtcgtgtcgatctgcgcgatttgccgctggtcactattgatggcgaagatgcccgtgactttgacgacgcggtttactgtgagaaaaaacgcggcggcggctggcgtttgtgggtcgctattgctgacgtgagctattatgtacggccgccaacgccgctggatcgcgaggcgcgcaatcgcggcacgtcggtttacttcccgtcacaggttgtcccaatgttgccggaggtgctctccaacggtctgtgttcgctaaacccgcaggttgacaggctgtgtatggtctgtgaaatgaccatctcggcgaaaggtcggctgaccggctacaaattctatgaagcggtgatgagctcccatgcgcgtctgacctataccaaagtctggcatatgctgcagggcgatcaggatctgcgtgaacaatatgcgccgctggtgaagcatattgaagagctgcacaacctctacaaagtgctggataaagcgcgtgaagagcgcggggggatctcgtttgagagcgaagaggcgaagtttatctttaacgccgaacgtcgcattgagcgtatcgaacagacccagcgtaatgacgcgcataagcttatcgaagagtgcatgatcatggcgaatatctcggcggcgcgctttgtcgaaaaagctaaagagccggcgttattccgtattcatgataagcccaccaccgaagcgatcacctcattccgctccgtactggcggagctggggttggagctgccgggcggaaacaaaccggaaccgcgcgattatgccgaactgcttgaatcgattgccgaccggccggacgccgaaatgctgcaaactatgctgctgcgttcaatgaagcaggcgatttacgatccggaaaaccgcgggcactttggcctggcgttgcagtcttatgcgcactttacctcgccgattcgccgctatccggatctttctttgcaccgcgccattaagtacctgctggcgaaagagcaagggaacaagggcaacaccacagaaacgggcggttatcactactcgatggaagagatgttgcagctcggtcagcactgttcgatggcggaacgccgcgctgatgaagcgacgcgtgatgtctccgactggctgaaatgtgactttatgctggatcaggtaggcaacgtctttaagggcgtgattgccagcgtcaccggtttcggcttctttgtccgtcttgatgaactgtttatcgatgggctggtacacgtttcctcactggataacgattactatcgcttcgatcaggtagggcaacgtctgattggcgagtccggcgggcagacatatcgcctgggcgaccgggtcgaggtacgcgtcgaagcggtgaatatggacgaacggaaaattgactttagcctgatctccagcgagcgcgcaccgcgtaacgtcggcaaaacggcgcgtgaaaaagcgaaaaaaggtgaaagtaaaaacgccggtaaacgtcgtcaggtaggtaaaaaagttaacttcgagcctgatagcgccttccgcggcgagaaaaaagcgaagccgaaagcagcgaagaaagacgcgagaaaagcaaaaaagccatcggctaaaacgcagaaaatagccgcagcgaccaaagcgaagcgtgcggcgaagaaaaaagcggcagagtgagcaataccctcttcaaacagaagagggtcaattatctgtaggccgggcaagcgtagcgcccccggcaaaacgtaaacaacgagtacattaatgagcgaaatgatttacggcatccacgcagtgcaggccctgctggagcgcgcccctgaacgttttcaggaagtctttattttaaaaggccgtgaagataaacgtctgttgccgctgatccacgcccttgagtcccagggcgtggttatccagctggcaaaccgccaatatctcgacgagaaaagcgacggtgccgtgcatcagggtattatcgctcgcgtgaaaccaggccggcagtatcaggaaaacgatctgccggatctgatcgcattacacgatcgcccttttttgttgatcctcgatggcgtcaccgatccgcataatcttggcgcctgtctgcgcagcgccgatgctgcaggcgtacatgcggtaatcgtgccgaaagaccgctccgcgcaacttaacgcgacggcgaagaaagtcgcctgcggcgcagcggaaagcgtgccgttgatccgcgtcaccaacctggcgcgcacgatgcgcatgttgcaggaagagaatatctggattgtcggaacggcgggcgaggctgaccatacgctgtatcagagcaaaatgcctggccgcatggcgctggtcatgggcgcagaaggtgaaggtatgcgtcgtctgacccgtgagcactgcgatgagctgatcagcattcctatggccggtagcgtgtcgtcgctgaatgtctctgtggcgaccgggatttgtctgtttgaagccgttcgccagcgcacctgatgctgatagtattttttaagaaaaaaccatccataatcggatggtttttttttatctttgactggtaatataaaaaacaaaacctaccctgtaatttcttttatttataaaaatgagatagagataaaaatatggcatggactccacggacgctggcggatgcattaaacaacatcgccgaattagatattgatatagaaaataatgaatcttcattaataataaaaatgaatgattatggcgatttaccactggcggttttatttacctcgcaacaaatagttatcgagacttatatctgtccggtaaatacgattagagataccgcggaatttaatcttttcttgctgagaaatcagaaggttttaccgctgtcttcggtcggtattacccaggtaaaacaggaggaatattatgtcgcttttggcgcgctgtcgttaaattcgtcgcttgccgacgtgatgctggaaatcaccacgcttgtagaaaatgcgttggatatcgctgaaataacacaagtctattcacaggaataatacaggcggcttacatgggaattttaaaaagtttgttcacgttaggtaaatcattcgttgctcaggcagaggaagccattgatgaagcacagggtgtacgtatgctggagcagcatattcgcgacgcaaaagccgagctggataaagcgggtaaatccagagtggatttattggcgcgggtgaagctaagccatgacaagctgaatgatttacgtgagcgtaaagccagccttgaaacacgggcgttggcggcaatgagtaagaatgtcgacgccgctttactcaacgaagtggcggaagaaatagcccgtctggaaaatgccattcttgccgaagaacaggtgctgactaatctggaagcctctcgcgatgcggtggagaaggccgtaacggcgacaggccagcggattgcgcagtttgagcagcaacttgaagtggttaaggcgacagaagccatgcagcgcgcgcagcaggcggtgacgacctcgaccgtcggagccgcgtcgaatgtgtctacggcggcggagtcgcttaaacgtttacaaacgcgttaggctgaacgctaggcccggctggatgccgccgcgcagctggaaaaagtcgccgatggacgcgacctggatgaaaaactggcgcaggccggtattggcgcaaccaataaaagcaatgctcagggtgtgttggcgcgtttacagcgtcaacaaggcgaataatgctctttacgtggattgtcaaaacctgccagcgtcatttgtccagactgacctggcccgctttgctgggcctgtttatcgggcagtatctgctttgttatctggtgctgcgcctgttgcgcgaaagcgcgttggtgagccagttaagcgattttatctattactgctcggtggtgggttccacattaggttttggcgatcttagcccgcagacggcgccaggacgtctgttcaccgcgctgtggcaaattccggttagcgtcgggttgttcggcgcgttaatgggaaaagtgattgcgcaggtacagggaatgttagcgaaaggaataacgggcatgggcgattatcgccatttacaccatcatatgctggtgattggctggcggggtcatcaaaccgaaaagatgatctcattgctgctatatgacaagcggcgtgcctttgaacgggttctgctgtgcgaactggaagatattcagcatccgctgccgggtaataactgggtggattttatccgcatcagcaactttaacgatccgcaggaacaccagcgcatggggctggagcagtgccagagcgtgattattttcgctcgtaccgatgagcagaccttcacggcggcgctctcgctggcagactatgtacccgcgcagtgccatattgtggtttatctggaagacgagcgttatgccggattactggaaacccactgcccgcgcatggagatagtccgtaacctttccgctgaacaactttcccgttccattcaggacccaggatcatcgcaatctgtcgcttccattatgaatccgatgctgggcgataccggattcgcgctgcctgtcccggcttctgtcgcgcctatgcgatacggcgcgctaatgcgttatatgaagcttcatcatgacgcgacggtgctggggatcagtcactgcaagaatggtcgtggtatggaattgaatccggtgatttcaactgaagtcagaggcggtatgtggctacatctggtcggtaataatcgcattctggctgaagaggtcgcatggcaagagatagaggttcccctatgatgcaattttttcagcgtttgctcggtaaaacaagcgcgccagcgccgattcgcggaccattaggattacatcttaacgccggtttcacgctggatacgctggcatttcggctactggagtcgtcgttgctggtggcgctaccgggtgaaaaatacactgtcgcggcagcgagtcgcatagatttaggcggcggcagtcagatttttcgctactacacctctggcgatgagtttctacaaattaacaccactggcggcacggatgttgacgacattgatgacatcaaactttttgtatatgaggaaagtttcggtattaacgaggaacgtcactggcgttcagccattgcgccagcggcaatagggccgatgacgctcaactggcaagaacggcgctggcagcgcttttttaaccatgaagagccgggcaatattgaacctgtctacatgctggaaaaggttgaaaatcagcaggcagagaaatgggacgttcacaattttacgatgggcttccagcgccaggtgacggatgacgcctgggagtatcttctattgaacggggaagaatcatttaatgagcgcggtgagcctgaatgggtgttttcacgcgccctcggcgtggatatcccgctcacttcactgacggttattggttaagcacatacagggaaattatgcatatactggacgcattactggctttctgcgcctatttttttattggcgcggcaatggtcattgtatttctttttatttactcaaagataacgccgcataatgaatggcagttgataaaaaataacaatactgcggcatcgctggcctttagcggtacgttgctgggctatgtcatccccttatccagcgcggcgataaactcggtcagtatcccggactattttgcctggggcggcattgcgctggtgattcaactgctgatttatggttgcgtaaggttatacatgcctacgctgagcgaaaaaattattcatcacaacgtggcggcggggctatttatgggaaccgcagcgctggctggcggtatttttaacgctgcctgtatgacatggtaacggaagatcatggcaaaaaaacgaaaatccagaagcacatccggcgtaggccattcggcaataagacgaatagccgaaccggtcaatccctttgagcggcaacgaaatcgctacacgccaaaatgcctgacgctggcgattatgggtggagcggccttttttctcctgaaagggtgcggtgatggcggcaatagtgacaacgacggcgatgggacgttttacgccacggtgaacgactgtattgacgatggcaatagcgccagcgtttgcgctgacggctggaataatgcgaaaacagaattttacgctaatgtgcctaagcaattgacgcaggagcgctgtcagacgcagtttggcgattgctactttgatattaccgagcggagctgggttccggtattaagcggctttttactcagccgcgcgattcgtcagaaccgtgatgaacaatacatctatagcagcggcggttcatcttatgtctcccgtcccgtctggcgcaccacatccggcgactatgcgtggcgcagcggcacagggaaaagcgataccgcgaccagccctggttatatcacacggaaagcgtccaccgtctcccgcggcggctatggccgttcttccagcgcccgcgggcactggggaggctaaccatgctacgacacaacgtaccgatacgtcgggatctggataagatcgcctgcgatcacggttttgactttcatgttatcgataacgaaatttactgggatgaaagccgggcctaccgttttacattacggcaaattgaagaacagatcgaaaaaccgaccgcagagcttcatcagatgtgtctggagattgtcgagcgggccgtccgggatgagcagagcatgcagcagctggcgatcccgccattgtactgggatgtcatcgccgaaagttggcgcagccgcgatccttcgctttacgggcggatggatttcgtctggtgcggcaaagatccggttaaattgctggaatacaatgcggatacgccgacgtcgctctatgagtcctcctactttcaatggctatggctggaggatgcccgtcgtagcggcgccatcccgcgtgatgccgatcaatacaacgcgatacaggagcggctgatcgcccgcttcagcgagctgtacagtcgggaaccgctctacttttgctgttgtgaagataccgacgaagatcgcacgacggtgctgtaccttcaggattgcgcgcagcaggcggggcaggaaacgcgatttatctatattgaagaactggggcttggcgtaggcggcgtgctgaccgatctggacgataacgtgattcgccgcgcctttaagctctacccgctggaatggatgatgcgcgatgacaacggcccgctgttgcgaaaacgtcgtgagcaatggattgagccattgtggaaaagtattctgagtaacaaagggctgttgccgttattgtggcgctttttccctggccatccgaatcttctgccggcctggtttgagggcgaaaaatcgctcgcagcgccaggcgaaagcagcgtacggaagccgatttattcacgtgaaggcggcaacgtcacgattttcgacgagcggcaaaatgttatcgatcatgccgacggcgactacgctgacgagccgatgatttaccaggcgtttcagcctttgccgcgctttggcgatagctatacgctgattggcagttggatcattgacgatgaagcctccgggatggggattcgcgaggacaatacgctaattaccaaagacacttcccgtttcgtcccacattatattgccggttaatcatacttttgtgatcttgctccggcgtcaatggcgcagtcatgaccatacttgacttcagcgccattgaaggagggagacaccatgtcctggcaaacacataccgtctttaatcaacctgctccgctcaataacagtaacttattcctgtctgatggcgcgctgtgtgaagcggtttcccgggaaggcgcgggatgggatagcgatcttctcgccagcattggccaacaactgggaacggcagaatcactggaactggggcgtctggcgaacgcgcatcctcctgagttgctgcgttacgatccccagggacagcgtttggatgacgttcgctttcatcccgcctggcacctgttgatgcaggggctttgcgctaatcgggtacataacctggcctgggaggaggaggcaagggcgggaagttttgtcgcccgggcggcgcgttttgtattacatgctcaggtagaagcgggaacactctgtcctgtcacgatgacctttgccgcgacaccgttgctattgcagatgcttcccgccactttccatgactggctggcgccgctgcgcagcgatcgctacgattcgcatttgctgccgggcgggcaaaagcggggtctgctcatcggcatgggaatgacggaaaagcagggcggatcggacgtactcagtaatacgacccacgcggagcggctggcggatgattcatatcggctggtgggacataaatggtttttctctgtgccgcaaagtgatgcgcacctcgtgttggcgcaggcaaaaggaggactatcctgtttctttgtgccgcgtttcctgccagacgggcaacggaactctgttcgtcttgaacgcctgaaagataaactcggtaatcgatctaatgccagcgccgaagtcgagtttcaggatgctatcggctggcggctgggagaagagggcgaagggattcggcatatcttaaagatgggcggtatgacgcgtcttgactgcgcgctcgggagtcatggcttaatgcggcgcgcattttcagtcgccatttaccatgctcatcagcgtcaggcttttggtaagccgctgatcgatcaaccgttgatgcgacaaaccttaagtcgtatggcgctatgcctggaggggcagacggcgcttttgtttcggctggcgcgcgcctgggagcaacgtcgcgaggcgaaagaggcattatgggcgcgattattcacgccagcggcgaaattcgccatctgtaagctgggaatcccttttgtggctgaggcgatggaggttctcggcgggatggggtattgcgaagagagcgaactcccgcgcctgtaccgtgaaatgccggtgaacagtatctgggaaggttccggcaatatcatgtgtctggatgtactgcgggtgctgacaaaacaacacggcgtctatgacgtattgagtgaagcttttgcggaagtcaaaggtcaggatcgccattacgaccgcgcggtacgtcagctacagcaacgtttacgcaaaccggacgaagcaatgggcagagagattacgcagcagcttttcttgctggggtgcggagcggaaatgctgcgtcatgcctcgccgccgctggcgcaagcgtggtgtcagatgatgctggatacacgcggcgaaatgccgctgcctgcccaggtgcaaaatgatttactgttaagggcgaccgggggactgcggtaacgtttgacctgtagtacatgccatccggcgcgagccacgcggcatcaggcatagagtatcgcctgtacgcgccagttatccgactgttgttcttcatacatttgaataattctgtaccaggacgcaccctgttcatcggctttcagggcgataatccgctctacatcctgtgggtttcctgcaacattactgaccgagatcaggccgatttcattcagacccgttacgcagtcagcactggcgaattcggcagactgtgccgtcgtactcaccagtccggcagaaagcagcagtgaggataaggcaagttcttgtttcatcgtcagctccttattacataccccgcatttaacaggacgctccatcacggtaaacctgtttgtttattgtgcacaggtaaacgcataagggcgcaaagcaatgtaaaactgactaaaaatcaatctactgttattgacgatacaaaatggcttgtgaataccactggccggttacaaccgtttcatcaaccattaagataacgtaataatcggctttcgcagcgacggctttcgctctgatttcatctattgcatcatccggggagccccgaaccagcgcgcttacggtccccatccgctgtagtccttgcgtttgatcgcgacggatttcctgcgggtgatcggcgacaggcggcgcaggttgcggcgtaccctgcagcacgctacacgcgcttaataacagcgctgctatcaatgaagcaaaccgacgcataactctatctcgtttcctgataatcatagtgtaatgccttattgatttccctttagggggaatgttcccgaagtgttacctgtcacgcgattttcgaatgaaaacgttgcgaaagcgtaacccagttctcaaacattatgaattattgcgctatccataaacttgcgttaagtatttctccgtggcataccggataaaaaggagagaataatgatagcgattgaaacacgacaattagccggaggcgtcgtactacatgccttcccggaagggaaacgcgccgtgccgcttccctgtgtggtgttctatcatggcttcacctcctccagcctggtttatagttattttgccgttgccctggcacaggcaggattccgggtagtcatgccggatgcgccggagcatggcgctcgcttcggcggcgactcacagggacgaatacaccgattctggcagattctgcaccaaaacatgcaggaatttacgacgttacgtgcggcgattcaggcggaaaactggctacttgacgggcggttggcggtgggcggcgcatccatgggcggtatgacggcgctgggcattatgacgcgtcaccgagaggtaaaatgcggggccagtttaatggggtcgggctattttaccgggctcgcccggacgcttttcccgccgttatccccgcagaacccggcacagcaggcggaattcgacaatatcatcgcgccgctacgtgaatgggaagtcacacaccagttagagcgactggccgacaggccgcttctgttgtggcatggtcaggaggatgacgtggtgcctgctatcgaaaccttccggctccagcaggcactcgccgcggcgaagctggataagcatgtgacctgtttatgggccgcaggcgtgcggcatcgcattacgccagaagcgttgtcggcgacggtagcgtttttccgacagcatctttaaacgcggagtatgcttacaccctgggcttcaagctgttgcaaaacctgcggattggcatttttgccggtaatcagcatagcgatctgatcggcgcggctgaacagcatccccgcgcgctcgccaattttactgctatcgaccagcgcgaccagtttcccgacgacgctgagcattttttgttccgccatggcggttagcatatcggtcttgtacaggccatctgcggttaagccctttccgctggtaaacatccagtggccagcatagagactgttttcacttccctgcgggctcagggtaatcgactggcttttattatactgaccacccatgataatcacgctgtcatgctcttgatcgatcagataattcgccagcggcagatagttggtaatgatctgtaccggcttcccgcacatttcacgccccagcaggaaagcggtggagccgcagttaatcactacgctttcacccgggtttaccagctgcgacgccgctttcgcgatgcgtactttttcatcgtggttttgcgcctggtgcagattcatcggcgtccagcggggccgctgttgggtaatggcctctgcgccgttgcgcacttttttaagtttcccgctttcgtcgagcttgttgatgtcgcggcgcgctgtcgccggggagatccccagacgctcaatcacgttttcgacggtaacaaagcccaactgtgccagcatatccagcagtatttgatgtctttgtgcttcagtcatgagctattccgatacaaattgatttgaaaagatgatatttgaaatagcctggaaatactaaagtaaatggaaaaaatgccgggtaatcccggcatgatatcgactcacaggaaggatttgaacggtagatcgggttcaatggtaaagcaatcgtcaaacccacgcggatagtggtattcgaaattgtctttatccagcggccaggtaaacttgccgccaacctgccagataaacggtttaaaaccatacttcaggcgatctttcttcatttcccatagcacgcggatctcttgcggatcggcctggaagttcgaccagatatcgtgatggaacgggatcaccactttggtattcagcgattccgccatgcgtaaaatatccgcgctggtcattttgtccgtaataccgcgcgggttttcaccgtaagaaccgagcgcgacatcaatttgatgttcgttgccgtgtttcgcgtagtagttggaatagtgagaatcgccgctgtgatagagattgccgcccggcgttttaaacagatagttaaccgcgcgtacatccatgccgtccggcagtacgccagcggctttctgatcggcgggcagggtgattaatgcggtgcggtcaaaggcatcaagcgcatgaatttcaatatctttcactttcacgacatcgcccggttttaccacgatgcagcgttctttcggcacgccccagccaacccataaatccacgcaggtctgcgggccgataaacggaacatcatcggcgcaattctgcattacggcagccgcgacattgacgtcaatgtgatcgttatggtcgtgggtcgccaggacggcgtcaatctgacggatagcgaaaggatcgagaacaaacggcgtggtgcgcaggttaggctgtaattttttgacgccagccatacgctgcatctggtggccggttttcatcaacggattaccgtggctctgtttaccggtaccgcaccagaaatcgacgcatacgttagtgccgccttcagattttagccagatcccggtacagcccagccaccacatagcgaacgtacccggcgcgacctgctcttgttcaatctcttcgttcagccagcttccccactccggaaacgtgctcagaatccatgattcacgcgtgatgctttgtactttactcatcgcatttaccttcatgtttgttcaaaatggttcaaaacgtgatttgttttgattaatcctgacactattttctcaagaaggcaatgggctattttttgactttttggaaggagagaacgcagtcaggagaagatttaatcttgtctggcgtcatgtgaatgtttgcatctttatgattttacttattttaatgaaaaaatgagttacctataagtaaaccatgtattaagtgtgctaattatttgcgcgctacgtcacagttaatcaaatttaatcttgttgtgattacttttgaaaattaaagtgaagggactttatcctgagcgcctgtgactcagcaacctcgtctaccggagatcgttatggagatcctctacaacatctttaccattttctttaatcaggtaatgaccaatgccccgctattactgggtattgtgacctgcctgggctatatcctgctgcgcaaaagcgtcagtgtgatcatcaaagggacgatcaaaaccatcattggcttcatgctgctacaggccgggtccggcattctgaccagcacctttaaaccggtggtggcgaaaatgtctgaggtctacggcatcaacggcgcgatttccgatacctatgcttcgatgatggcaacgatcgaacggatgggtgatgcgtatagttgggtaggctacgcggtgttgctcgcgctggcgctgaatatttgttacgtcttgttgcgacgcattaccggtattcgcaccatcatgttgaccgggcacatcatgttccagcaggcggggctgattgcggtctctttctatatcttcggctattccatgtggaccaccattatctgcacggcgatactggtttccctgtactggggtattacctctaacatgatgtacaagccgactcaggaagtgacggacggctgcggtttctccattggtcaccagcagcagtttgcttcctggattgcctataaagtcgcgccgttcctgggcaaaaaagaggaaagcgttgaagacctcaaactgccgggctggctgaacattttccatgacaacatcgtctccacggcgattgtaatgaccatcttctttggtgccattctgctctcttttggtatcgataccgtacaggcgatggcgggtaaaacccactggacaatctatatcctgcaaaccggtttctcctttgcggtggcgatcttcatcatcacccaaggcgtgcgtatgtttgtcgccgagctctctgaggcctttaacggtatctcccagcgtctgattccgggcgcagtactggcgattgactgcgccgctatttatagcttcgcgcctaacgcggtggtctggggctttatgtggggcaccatcggccagctgattgcggttggcatcctggttgcctgcggctcctcgatcctgattattcctggctttatcccgatgttcttctctaacgccactatcggcgtgttcgctaaccacttcggcggctggcgtgcggcgctgaaaatttgtctggtgatggggatgattgaaatctttggttgcgtctgggcggtgaaactcaccggtatgagtgcctggatgggtatggcggactggtcgattctggcaccgccgatgatgcagggcttcttctccctcggtatcgcctttatggccgtcatcattgtaattgcactggcttatatgttcttcgctggccgcgcactgcgcgcagaagaagatgcagaaaaacaactggcagaacagtctgcttaataaggagttttgattatgaccgtacgtattctggctgtgtgtggcaacggacagggcagttccatgatcatgaaaatgaaagtggaccagtttttaacccaatcaaacattgaccacacggtaaacagctgcgcggttggcgagtacaaaagcgagttgagcggcgcggatatcatcatcgcttctacccatattgcaggcgaaatcagcgtgaccggcaacaaatatgtggttggcgtgcgcaacatgctgtcgcctgcggattttggcccgaaactgctggaagtgatcaaagaacatttcccgcaagacgtgaagtaaggatgcaacatgaaattacgtgattcactggcggagaataattctatccgcctgcaggctgaagcgaatacctggcaggaagccgtcaagatcggcgtcgatttactggtggctgcagacgtggtagagccgcgctattaccaggcgattctggatggcgttgagcagtttggcccctattttgtgattgcccccggcctggcgatgccgcatggccgcccggaagaaggggtgaagaaaaccggtttttcgctggtgaccctgaaaaagccgctggagttcaaccacgaagataacgacccggtcgatattctgatcaccatggcggcggttgatgccaacactcaccaggaagtgggcatcatgcagatcgtcaacctgtttgaagacgaagctaattttgaccgtttacgcgcctgccgtaccgcgcaggaagtcctggatctcattgaccgcaccaacgcggcagcttaagaaggaattgaaaatgtcattaccaatgttgcaggtcgcgctggacaaccagactatggatagcgcctatgaaaccactcgcctgattgccgaagaagtcgacattatcgaagtgggcaccattctgtgcgtgggcgaaggcgtgcgtgcggttcgcgacctgaaagcgctttacccgcacaaaatcgtgctggcggacgccaaaattgccgatgccggtaaaatcctctcccgtatgtgtttcgaagccaacgcggactgggtgaccgtgatttgctgtgcggatatcaacaccgcaaaaggcgcgctggatgtggcgaaagagttcaacggcgacgtgcagatcgaactgaccggttactggacctgggaacaggcgcagcagtggcgtgatgcgggtattcagcaagtggtttatcaccgcagccgtgacgcgcaggcggcaggcgtggcgtggggcgaggcggatattaccgcgattaagcggctgtccgatatgggctttaaagtgaccgtgaccggcggactggcgctggaagacctgccgctgttcaaaggcattccgatccatgtctttatcgcggggcgcagcattcgcgatgccgaatcgccggtagaagccgcacggcagttcaaacgctccattgcccaactgtggggctaaggagcggctatgctgtcgaaacaaattccgctcggcatctatgaaaaagcgctccctgccggggagtgctggctggagcgcctgcggctggcgaaaacgctgggttttgacttcgttgaaatgtcggtggacgagaccgacgcccgactggcgcggctcgactggagtcgcgagcagcgcctggcgctggtgagcgcggttgctgaaaccggcgtgcgtgtgccgtccatgtgtctgagcgcgcatcgtcgttttccgctcggtagcgaagatgacgcgatacgggcgcaggggctggagattatgcgtaaagcgattcagtttgcgcaggacgtcgggattcgcgtcattcaactggcggggtacgacgtttactatcagcaggccaacgacgaaacgcgttgccgcttccgcgatgggttaaaagagagcgttgatatggccagccgcgcccaggtgacactggcgatggagatcatggactacccgctgatgaattccatcagtaaagcgctgggctatgctcactacctcaataacccgtggttccagctctatccagatatcggcaatctgtctgcctgggataacgacgtacagatggagctacaggcgggaatcgggcatatcgtcgcggtacacgtcaaagatactaaacccggcgtgttcaaaaatgtgccgtttggcgaaggcgttgtcgatttcgaacgctgcttcgaaacgctcaaacagagtggctattgcgggccctatctgattgagatgtggagcgaaacagcagagaacccggcggcagaggtagcgaaagcgcgtgactgggtgaaagcgcgcatggccagcgccggtctggtggaggcagcctaatgcaaaagctcaagcagcaggtatttgacgctaacatggatttgccccgttatgggctggtgacctttacctggggcaacgtcagcgctatcgatcgcgaacgcgggctggtggtgattaagccaagcggtgtcgcctatgaaaccatgaaggtagatgacatggtggtggtggatatggatggcaaagtggtggagggacgttatcgtccttcttccgataccgctacccatctggcgctgtatcaacgctatccgtcgcttggcggcgtcgttcatacccactccacccacgccacggcatgggcgcaggcggggatggctattccagcgctcggcaccacgcacgcggactatttctttggcgatattccttgtaccagagcgttaagcgaagaagaagtgcagggcgagtacgagctgaacaccggcaaggtgatcatcgaaacgctgggcgaggtggaaccgctgcatacgccaggtattgtcgtgtatcaacacgggccgttcgcctgggggaaagatgcgcacgatgcggtacataacgcggtcgtcatggaggaagtggcgcgaatggcgtggattgcgcgcggtattaacccggcgctgaatcccatcgacgattatctgatgaataaacacttcatgcgtaagcatggcccgaatgcgtattacgggcagaagtgaagtatgagctccggaatgtgaatattatcgggatgtcacaggtctaattccggagccatctttccgcgaaaaaagccccctgctcagggggcaaatcaactatggctttttcgttggttttcctgatgctagcgataaatattcgcgctggcgtgtatattgccgttgctacccggttcccggataagtatgacgtgataatacattgcgtttcgcacgtcggcctcttcattcagcgccagattggcttcactttccgtggcgaagttatggttgatgtagattacgcctaagctgcgcacatcatccatatttctggcctgatgattatttaactcgacggctgccgttgccgttatgccaggcaaaagcgcagccagaaataacattatccgggctcgcatagagtacctcctcagcagcgcggtctggttggcgatatccccctttagtgaatcgcttctggtttaattttaaccataacccgccgcagagatggcgaccttttctgatgctgttgttcaaaaaattatcgcattgtcgctttttacctgattaacaacccattgatgtatgccgccatgtttaagaaatcctgtgtggcaaaaaagtgcgctgaccacagtgtcaatttctctgccgcaacaggccgtttatagtggcatgcgatatgaagttaatatctcagcagcaaaatgtgacgggacaggcgttacgttcggcacgataaataattgtacaatcaccttgagtttgcccgcaggcgccagtattataacgcgtcatttttcagccgacctttaacacgttccttgcctccatgggccgcggctgacccagacaggaggctgaataatccgtaaggagcaattcgatgcgtcattacgaaatcgtttttatggtccatcctgaccagagcgaacaggttccgggtatgatcgagcgttactctgccgccatcactggcgcagaaggcaagatccaccgtctggaagactggggccgccgtcagctggcttacccgatcaacaaactgcacaaagcgcactacgttctgatgaacgttgaagcgccgcaggaagtgatcgatgagctggaaactaccttccgcttcaacgatgccgttatccgcagcatggttatgcgtactaagcacgctgttaccgaagcttctccgatggttaaagcgaaagacgagcgccgtgagcgtcgcgatgatttcgctaacgaaaccgcagatgatgctgaagctggggattctgaagagtaatttctgatgaccaaccgtctggcgttgtccggcaccgtgtgcagggccccccttcgaaaggtcagtccatcaggaattccgcattgccagttcgtgcttgagcatcgttctgtgcaagaggaagccggctttcaccggcaggcgtggtgccaaatgcccgttattgttagcggacacgaaaaccaggccattactcacagtataacggtcggcagccgcataaccgttcaggggtttatttcttgccacaaggcaaagaacggtctgagcaaaatggttctgcatgccgagcagattgaattgatagattctggagactagccatatggcacgttatttccgtcgtcgcaagttctgccgtttcaccgcggaaggcgttcaagagatcgactataaagatatcgctacgctgaaaaactacatcaccgaaagcggtaagattgtcccaagccgtatcaccggtacccgtgcaaaataccagcgtcagctggctcgcgctatcaaacgcgctcgctacctgtctctgctgccgtacactgatcgccatcagtaatcggtcacggtccattaatacgactttgagaggataaggtaatgcaagttattctgcttgataaagtagcaaacctgggtagcctgggtgatcaggttaacgttaaagcgggctatgctcgtaacttcctggtaccaaagggtaaagctgttccggctaccaagaaaaacgttgaatacttcgaagcacgtcgcgctgaactggaagctaaactggctgacgttctggctgctgcaaatgcacgcgcagagaaaatcaacgccctggaaaccgttactatcgcgtctaaagcaggcgacgaaggtaaactgttcggttccatcggtactcgcgacatcgctgacgctgtgactgcggctggcgttgacgtggctaagagcgaagttcgtctgccgaacggcgttctgcgtaccactggcgaacacgaagtgaacttccaggttcacagcgaagtattcgcaaaagttatcatcaacgtggttgctgagtaatcaggcattctcgtttttgctagcaacgaaacgtcggcccagcgccgacgttttgcttttttaaccccatcgcttttcgactggctatctccccctcttttcgcgataatcaaaaataaaacattattttaatttcttggtgaaagaatggatacccaacgccaggcctccccgtttgcccgcaaaaacgtcgtttatgtgtgtgccgcattttgttgcttgctatggggcagcgcttatccagccatcaaaagcggttatgacctctttcagatagccaccgatgatatcccttctaaaattgtttttgctggttatcgttttttgtttgcgggtgggttgctactactgttcgcgctgcttcagcgtaaaccgattggtcggtttcgtccgcgccagtttgctcagttgacgttactggggctgactcagacgtcgctgcaatatctctttttctatatcggccttgcgttcacctccggcgtgaaaggctcaatcatgaacgcgacaggcacattcttcagcgtattgctggcgcactttatttatcagaacgaccgattgagctacaacaaaacgctcggctgtattctgggctttgcgggcgtcatggtggtgaacgtcagcaacggcctggatttcagctttaatctgccgggagaaggctccgtggtgctggcggcgtttattctttctgcggccacgttgtatggcaaacgtctctcgcagacggtcgatccgatggtcatgactggctatcaattggggattggcggtctggtactggtcattggcggttacgtttttggcggtacgctgacgatacatggcttctcgtcggtggcgattttagtctacctgacgctgctctcgtcggtcgcttttgcgctatggagcattttactcaaatataatcgcgtggggatgattgcgccgtttaactttctgatcccggtttctggcgcggctctttcggctatttttctcggcgagaatatattggagtggaaatacatgattgcgctggtgctggtgtgttcggggatttggtgggtgaataaggtgaagcggtaatgcttcacctgaacgaatagggtatagacggggtaaggcgcagccggcgttactgtgcgcgaataaaactgccgtcaggctgacgcgtaaacagcacctgttgaccgttatcgccatctatcgttaaacctgtcaccaccccgctggcattctggcgaattttaatcatttgaccatttttgagattactcagcggcttgccagcgccttctacctgcgccattgcataaacgtctgtcgggggcagcccgtggtcacggaacagttgcgccagagttttaccagactctacccggtacgagcgccactgttgaccgatgccgctatcctgctggaaaggctgcgtctgcggctggttttgttcttccggctggccttcctggataggttccggcgcaacgggcgccacctgatccggatcgttttgcggcgcgaccagctgcgcctgaagctgggcctccgtcggcggctgtgattgcgattgcagatccaattgcgcttcccgcgtgacgacaggtgagtcgctggtctcgctggcgggcagcaggaaaccgatcaccagcacgatagcggcaatgataatgccacgacgatgcataggcggcagcggttccatgatgcgaaaattatccggcgcgtgccagattttcgccagggttggttttaattcaaagcgcccgggcatggtttacctcctgctccgcatctcgttccttaatcatagagtatagatggctaacgctatgatactggtagtgctatccgctttcgtgacatcaatacggataatctattgtttctttttccctgcgatttgtcatcctccctgagacaaagttttaccagaagaagcgtggctgttatgctgcccgctacttttttgatatccgatgaaggaaaaataatggccaccccgacttttgacactattgaagcgcaagcgagctacggcattggtttgcaggtagggcagcagctcagcgaatccggtcttgaagggctgttgcctgaagcgctggttgcaggcattgctgatgcgctggaaggtaaacacccggcggttcctgttgatgtggtgcatcgtgcgctgcgtgaaattcatgagcgtgcggacgcggtgcgtcgtgagcgtttcaaagcgatggcggccgaaggcgtgaaatacctggaagaaaaccgcgaaaaagacggtgtgaacagtactgagtctggtttacagttccgcgttctgacgcagggcgaaggcgcgattccggcgcgtaccgaccgcgtacgcgtgcattacaccggtaagcttattgatggcaccgtatttgacagctccgtcgcgcgcggcgaaccggctgaattcccggtaaatggcgtgatcgccggctggattgaagcgctgactctgatgccggtaggttccaaatgggaactgactatcccacaggagctggcctatggcgagcgtggggccggggcatctattccgccattcagcaccctggtgtttgaagtggaactgctggaaattctgtaagcgccccgggtttgccggatgatggcgtaaacgccttatccggcaaccctggcttcagcagatgccaatattttattttgcaaatggcgtcgttacgtgtatttttgtgagctaattcgcattatcaaagtgatataacactcattttaaacataaaattaacattgtatttgaatcttagtattcatcccgccgattcttacctaatatcgatgagtcctgataacaggatcgtcgtatcatagaccaaaggccgtagagcccgcacaacacagacaggtacaggaagaaaaacatggtagatcaggtaaaagtcgcagccgacgaacaggctccggctgaacagtcgctacggcgcaatcttacaaaccgtcatatacagcttatcgctattggcggcgctattggtaccggtctgtttatgggatcgggtaaaacgatcagtctcgccggaccgtcgatcatttttgtgtatatgatcatcggttttatgctttttttcgtgatgcgcgccatgggggaattgctgctctcgaatctggaatataaatcgtttagcgattttgcttccgacctgcttggcccctgggcgggatatttcaccggctggacgtactggttttgctgggtagtgaccggtatggctgacgtggtggcgattaccgcctacgcgcagttctggtttcccggcctttccgattgggtcgcctcgctggcggtagtgatcctgctgctaagcctcaacctcgccaccgttaaaatgtttggtgaaatggaattttggtttgctatggtcaaaatcgtcgccattgtggcgttgattgtggtcgggctggtgatgattgcgatgcactttaaatcgccgacaggcgttgaagcgtctttcgcgcatctgtggaatgacggcggctggttcccgaaaggtattagcgggttctttgccggtttccagattgcagtgttcgctttcgtgggcattgagctggttggtactaccgccgcagaaactaaagatccggaaaaatcgctgccgcgcgcgattaactcaataccgatccgtatcatcatgttctacgtctttgcgctgattgtcattatgtcggtgacgccgtggagttccgtggtgccggataagagcccgtttgttgagctgtttgtactggtgggtctgcctgccgctgcgagcgtgatcaactttgtcgtgctgacctcggcggcgtcttccgccaacagcggcgtcttctcgaccagccgtatgctgtttggcctggcgcaagaaggcgtggcgccaaaagcgttcgctaagctatcgaaacgcgcggtaccggcgaaaggcctgaccttctcctgtatctgcctgctgggcggcgtggttatgctgatggtcaacccgagcgtgattggcgcattcaccatgatcactacggtttcggccatcctgtttatgtttgtctggaccatcattctgtgttcatacctggtgtaccgcaaaaagcgtccccacctgcatgaaaaatccatctataagatgccgctcggtaagctgatgtgctgggtctgcatggcgttctttgcattcgtgctggtattactgacgctggaagacgatacgcgccaggcgctaatcgtgacgccgctgtggtttatcgcgttgggtctgggctggctgttgataggtaagaaacggatggcgggaatgcgttaattgttttgcccggtggcgctggcgcttaccgggcttacagcgtaacgttgatttggaggccggataaggcgccgtttacagccgccatccggcaaaatgcccggctggcgattattccccggccagcgcgcgtgggaacagcacgttattctccaggctgatgtgctccatcagatcatcaatcatctcattaatgccgttatacatcgctttccaggtggtgcaggcttctggcggcggcgttacatttttggtgacgtgtttgatgacgtctaccagctctcccgcctcgtcatgctcgctttccattacgcttatcgggcccgttgcctggcgacccataccctgtttgatcatggggaacaggatctgttcttctttcatcatatggctggaaagctcttcatgcagcgcggtgagatattttgtcaggccgcgtgggacgtttggcttatccgcgtggacgcgttccactttggttgcctgcagaataagctccggcagttgttcgcgatgtcggtcatgatagcgaacaacgatatggtcaataatgtccgccagcggaacggcgcgccagtctttttcgatgggctgttcagccaactgcgccagttgcgcttctatgatgtcaatatcgacgtcgtgacgcgcggcggcgcgcgccagcgtctgttttccgccgcagcagtaatccatatcgtactggcgaaacagcgccgatgcgcggggaatagagagcgccagttcgcctaaaggttgatcgcgataagccatagccgttacctcatttgcaataatataagttgtattttaaatgcatctttaaggcgaagctataactctttcggggtgcgtataatttaagcgagtatgaaattagcgttccgtgaccggaacgacggtcgctttttccggtttcgctctcacggcaatgaccacgcccgccaccaggagcgcaatgccgcttaacgtcaggaatggcgggatttcctggcgcagaatgaaggtatagagcagtcccgccaacgtctcaaaaacaatcagcggccctaaaataacggttggcaatttttggctggcgatattccagcacagcgcgcccacccaggaacacagcaccgcgatggcgatcatcagaccgataaacagcgcgggatgcgggccaaagggcagggtaaacagcggtttctggatactcagccacagacagaccgccgcatagccgattaacgagaccggcagcgtaaccagcgcctgcgccgttgcccacatcatgggatgtttgtcgggattttcccgcagccagcgggcgttgcgcagcgcataccatgcccagcacgctacggaaatcagcgccagcacaatgcctgaaccatagcgccagccgctaacatcggacaatccctggctaagttcagcaatattgacgcacagcaggccaaaaccgataagcgccagcgcgggcgctaaacgccgccaggataatctgccgtctcgttggctatagagaacgttagcgaaaagcggaatgacgaccggcaatgtcccgatgatcatcgtcgacaccggcgcgccggttcgctgaatggcgctggcgaggcaggcgtaatagattacattgcccatcagggtcagcgacagggcggtggaccagtctttgcgcgttaactggcgtaaccgcgtgcggcctaaccaggcaatcggcagggcaatcagccccagcgccagatagcgtcccattgactgtaagagggccgggtaatccggcacgattaacgggccgacgaaaatcaatccccacattagccctgccagcagggcgtatagcacgccgctaatcatcagattctcctcataaaccgttccgtcattatcagagaaggtctatgaggatgccacataaattaactaaattttaacatttacagtacggagcgaaggctttctgtgagcgtcgtcgtcgggcgaccgatgagtttacgcagcgtatggctgtcatcaaacaggccgcctttcgccgcgccagcgtcagaattggccaacatatccgccagtccgtcaggcaggcctgcgcctttcagcgcggcggcaaaatcgacttcgctcaggttctggtagacgattttttttccgctttgatgagtaagttcatccgccaactggcttaatgtccaggcgtcatcacccgccagttcgtagacattcccggcgtgaccctcttcacggatgacgcgcgcggcggcggcggcatagtcagcgcgcattgcggaggcgattttcccttctcccgccgcgccaataaagacgccatgcttcagcgcggcagggacgctcgccaggtagttttccgtataccagccgttacgtaatagcgtgtgaggaatacctgactcagccagcatcttttccgtttcaatatgttcatcggcgagcgccagcggcgatttatccgcatgtagcaggctggtataggcgatgaatttcaccttcgcggcaatggcggcctgaataacgttgcggtgctgcgcggtgcgttgtcccacttcgctggatgatataagcagcagtttatcaacgccctgtaaggcggtggtcagcgcggcttcgttagcgtaatccgcctggcgaacggcaatcccgcgctgactgagcggggcggcttttttcgggttacggacgatcgcgacgaggtggctggcgggcgtcgtttttagcaggttttcaataacgtgttggcccagttggcccgttgcgccagtgatagcaatcatggtgaactcctcagtgttggtcttgtgttttattacgctaccacctaaacttacttttagtaagtacgtacaaaaaggtaagtatcaatgcgcgctcatactctttcccggcagttgcgtgaaggcaatctctttgctgaacagtgcccgtcccgtgaggtgttaaaacatgtcaccagtcgctggggcgtactgattctggtggcgttacgcgacggtacacaccgttttagcgacctgcgccgcaagatgggaggcgtgagtgaaaagatgctggcgcagtcgttacaggcgcttgaacaggacggatttcttaaccgggtgtcatatccagttgttccgccgcatgtggagtacagcctgacgccgcttggcgagcaggtgagtgataaagtcgccgcgctggcggactggatagaactgaatttgccgcaggtattggcgcagcgggaacgtttatcagatggcggctagcgctttattcggcctgccagtcaggccgaataaacgcagcgccatacgggacacacgttacttgcttaaatccacctgataaatggcaaaaccgatatcatcgacggcaaccttcttcatcggatactgccctttcgctttaatgaaggcagcggctttatcgcctggcgatgtttcaaagcggatatccagcgccgtatcgctgtggattggcgccagacgccagttattatccgccgccggatggatttcgcccgcgcgttttgactctgcgccaatccatgccgccagcacggcgcgattttcatccggagacgcaaaggcgatatggctgtcgcccgtgccggcaaacttgccgccgtaagcgcgatagttattcgtggcgaccaggaacgtagcgttcgggtcgacaggcttaccgttaaaggtcaggtttttaatacgttccgcctgcggattcaccatctggcattcgccatcatagcgggcgggctgtgacacatcgatttgataattcacgccgtcaatgacatcgaaattataggtgcgaaagccatcccaattgatcaacgattgcggtttgttgctgtgaatatcaatctgattaaattgtccggcagaacattccagccactcttttacctccttgccgctggctttcaccaccaccagcgtattcggatagagataaagatcggcggcgttacggaaggtcaactggcctttttccacctcgacaaagctggcaggatcgttcttacgcccgccaactttaaacggcgcggcggcggacagcaccggcagtttcgccagatccggatcgccctgaataaagtgttccacatacgctttttgcgcgttattcaccacctgtacggtaggatcgtcctgcaccagagcaagataactgtacatattatcggcggatttaccgatgggcttgctgacaaactcgcgggtggcatcgtgatcggctttcagaataccgaccagcttactgtcttccgccgccagcgactttttagcggcggcgtcatagataggccgcgcttccgctttcgcctgcgtaacctgccatttgccgctgtcgttattgagcaccagatcgaccactcccagatggtcgccccacatgccaggcattaccgcaggaatgccgttaagcgtacctttggcgatatccgcgcctttgatgtcggcaaaatctttaccggggaagacggcgtgagcgtggccaaacataatcgcgtcgacgccaggaacttcgctgaggtaataaaccgagttttccgccatgctgtggtacggatcggcagaaagacctgaatgagcaatgactaccacgatatcagcgcctttctcgcgcatttcgggcacatatttccgggcggtttccgtaatgtcattgacggtaactttgccgctcaggttcgctttatcccaaatcatgatttgcggcggaacaaagccgatatagccgattttcagagtttgcgggttgccgtctttatcaataacgctcgtctctttaatcagataaggcgtaaagagcggcttttgggttttaacgtcgataatattggcgttaacataagggaatttcgcgccagccagcgcgttatgcagatagtccagaccataattaaactcatggttgccgaggtttccaaccgcgtaatccagagtgttgagcgctttatagaccgggtgaacgtcaccgtctttgagcccttttgccgccatataatcgcccagagggctcccctgaatcaggtcgccgttatccaccagcacgctgtttttgacttcatttcgggcggcatgaatcaaacttgcggtacgtaccaatccgaatttttcggttgcggtatccttgtaataatcgaaatccatcatgttgctatgtaaatcagtagtttccatgatacggagatcgacggtggccgcattcacgctggcggcgatcagcgtagccagaagcgttgcactaaacttaatcatcagaggcaccttttaagaacgcaatagaaaagccggatagtgaaaaatagcgatgacaaacagtgaaacccgatatcgttccaaccgtcgccagaagaaggcgaaaccgccccatccggccgattttttgcgagtgttcacagaaaggtgaatcatgccatgaaagctattatcaaaaccgctgacggtatcacagttggcggaacccttaacgatcgggtataagtaaaacaacgagttaacgcccccgtcataaagaggtggagaatgttagaacaagtatgccagcttgcacggaacgcgggcgatgccattatgcaggtttatgatggagccaaaccgatggagtacgcccgcaagcaggacgattctccagtcactgcggcggatatcgccgcacataccgtgattctcgaagggttacgcacgctcacgccggatattccggtgctttcagaagaggatccgcccgcctgggaagtgcgccagcactggcagcgttactggctggtcgatccgctcgacggcaccaaggagttcatcaagcgcaatggcgaattcacggtcaatatcgcgctgattgagcagggcaagccggtgttgggcgtggtctatgcgccggtgctgaaagtgatgtactacgcggcggaaggtaaggcctggaaagaggagtgcggggtgcgtaagcagattcaggtccgggatgcccgcccgccgctggtggtgattagccgttcgcatacggatgatgaactcaccgaatatctccaacagcttggcgaacatcagacaacctctattggttcctcgctgaaattctgccttgtggcggaaggccaggcgcagctttaccccagatttgggccgaccagcgtctgggacactgccgcaggtcatgccattgccgttgcagccggggcgcacgttcacgactggcagggaaaaacgctggactatacccctcgtgaatcgttccttaaccccggcttccgggtgactatttactgaggagcttatgcagcaggtcgaccacctgctgtacctcttgctgggttaacgcgccatctttcacccattgaacccgaccgtctttgtcaagcacgatgacggcggacccctcttcttttaattgccaggcgttacgcgccacgccattgctgtcgacaataaattgcgaccacgggtagagctttttattactttctatactgctacgcacgaacataccggagcctgggatcgcatcatcggtgttcacaattgtggtcgtctggtatctgtcatgcgggagcttggctgatttaatcgcttcaatcagcgtggcgtttttttccttcgctgacgttcgacccgcaatgtgcagcaggacgcgcacttttcccgccagctgcgcgctattccagtttttataactaaactcatctttattcaacgtcagttcgccacggtcggcaatgcctaccggcggcacccgttggttaacttcaaggttatgcgcacaagccattatggggagtagcagacacgacatcgccagaattttacgtaaggtcatggtcattccttctttatttttttgcaggtgatccgaccactttgggccgatagttaatcatatgtgcgattgatgctttttcccgcaaaggggatgccagtttgcgggcgggcgcacacttcctgtgaaaaatgaaggcatatactgagaaaaatgagctgatgtttagataattctgaataactgtaatcaaaaggtaaatatacttatgcacactggaaacgacgtagatatggtctatagtcatatggcattaaaatttgcgccttaaaactgttgggccgattgtggcatcgcaagggcgtaatactctgcaggagacaacaatgaaaattttccaacgctacaacccgctacaggtggcgaagtacgtgaagatcctgttccgtggacggttatatatcaaggatgttggcgcttttgagttcgataagggtaagattcttatcccaaaagtgagagacaagcagcacttgtctgtgatgtctgaagttaaccgtcaggttatgcgtctgcaaactgagatggcgtaaccaaaagtgctatgcagtaggttaaaaaagtaaaaaaaaacggctcctgaatcaggagccgttgatgtttctggcaaacggatttcaggccgcgctgtcttctttaccttgcgcatcgggcagtttcggcgccggtacgttgcttttattgtcgagacgcgtcaccagcaactgatcgatacggtagttgtcgatatccaccacttcaaatttgtagccggaaaacttcaccgaatcagtacgttttgggatcttgcgcagcataaacatcataaagccgccaatggtttcatagttgccggattgcggaaactcatcgatatccagcacgcgcatgacgtcgtcaatcggcgtgccgccgtcaaccagccaggaattttcatcgcgcgccacaatttgctcttccagtccctggccgaccaggtcacccattagcgtggtcatcacatcgttcagcgtaatgataccgacgaccagagcgtattcattcataatgaccgcgaaatcttcgcccgccgttttgaaactttccagcgcctcagaaagggtcagcgtatccggcacaatcaaggtattgcgaatttgcacgccgctattcagcgccatactttggttagccagcacgcgattcagcagatctttggagtctacatagccgatgatgtggtcgatatcttcattacacaccaaaaattttgagtgcggatgttcggcgacctttttcttcaggctttgttcgtcttcgtgcagatcaaaccagatgatactttcgcgcgacgtcatagaagacggtacggtgcgagattcaagttcaaacacattttcaattagttcgtgctcttgcttgcgcaagacgcccgccagcgcgccggcttccaccactgcgtaaatatcatcagaagtaatgtcgtctttccgcaccattggaattttgaacaggcggaagatgttgtttgccatgccgttaaacagccacaccagcgggcgaaaaacgaacaggcagaagcgcatcgggttgatgatacgcaaagccacagcttctggcgcaatcataccgatgcgtttcggggttaaatccgcgaacaggataaacagccccgtcaccagcgagaaagagagaataaagctcagctgctcggagagttctggcgacatatagtgcgagaagagggcggaaaaggcgggcgaaaatgccgcatcgccgacgataccgccaagaatagcgacggcgttcaggccaatttgcacaacggtgaaaaacatgccgggattttcctgcattttcaatacgcgttgtgcgttgatactgccttcatcagctaataacttaagtttaatcttacgtgatgcggcaagcgagatctcggagatggagaagaacgcacttacagcgatcaggcagaatataatgaatatactgtttaacatatcttatccggcgaaacgccagatcctcggaagggaagtttataaatccgtgtggtaacgtttaatgaaaaccggctcgtagcagtgagccgataagttcagggctagtatagcgtaagctactgtaaagtcgccagagggttcattttcaactccgacaagttccccctacgccagcgtcgtcacgcgtcaggcggcaggcaaacgccgatcccgccaatcccgcagtaaccatatggatttttgtgcagatactgttggtgttcatcttcggcgtagtaaaacggcgtcgcatgggcgatttccgtggtaatagggcgatggtctccggcggcggtcattgccgactgaaagcgctcgcgactggcgtgagcggcggcattctgttccggcgttaagggataaatcgcagaacggtattgcgtaccgtgatcgttaccttgttgcatcccctgcgtcggatcgtgattttcccagaaggtctgtaaaagctgctcataactgataacggcaggatcgtacactatccgtaccgcttcggcatgaccggtctgcccggagcagacttcccggtaggttggattaggcgtgtaaccgcctgcataccctgccgcggtgctatatacgccgggcaattgccagaataaacgttctacgccccagaaacagcccatagcgaagtaggcgatctccatcccggcagggacattggtcatagagtgttcatttaccgcatgcagagtggcgatcggcatcggggtgttgcgtcctggtaacgcatctgcttgagtaaccagatgttttttatcaaataaactcatgagctattctcccgaaagcgttaattggcgttaaggttgtaacgagacgcatctttgcacacaataacaacattaatgtatctggatttaaccataagaaatatttgggcagtcgtctgcttttcaatcgaaattgttgattttatgttaagccgcggagcggtagtgtgattttttccaggggtgggaataggggatattcaggagaaaatgtgccacatatccgtcagttatgttgggttagcttactgtgcctgagcagttctgcggtagccgcaaatgttcgtctgaaagtcgaagggctatccggagagctggaaaaaaacgttcgcgcacagctctctacgattcagagcgatgaggtgacgccggatcggcgctttcgcgcccgagttgatgatgcgattcgcgaagggcttaaagcgttaggctattacgaacccactatcaaattcgacttgcttccaccgcctgcgaaaggacggcaggtattaatcgccagggttacgcccggccagccggtgttgattggcggtacagaagtcattttacgcggcggcgcgcgcacggacaaagattatctggccttactgaaaacgcgtccggcaatcggcacggtgctgaaccagggagactatgacaattttaaaaagtcgttaaccagcgtgtcgctacgtaaaggctatttcgacagcgaattcattaaaagtcagttgggaattgctctgggccgccatcaggcgttttgggatattgattatgatagcggtgagcgctatcgcttcggacctgtcaccttcgaaggttcgcagattcgtgatgaatatttacaaaatctgttgccgtttaaagagggtgatgagtacgaatcgaaagatttggcggaactaaaccgccgactttccgctaccggatggtttaattctgtcgtggtggcgccggaatttgagaaatcgcgtaaaacaaaaattctgccgttaaaaggcgtggtatcgccgcgaaccgaaaacacgattgaaaccggggtggggtactccaccgacgtcgggccgcgcgtgaaagcgtcgtggaaaaaaccgtggatgaactcttacggtcatagcctgaccaccagcaccagtatttctgcgccggaacaggtgctggattttagttataaaatgccgctgctgaaaaacccgctggagcaatactatctggtacagggcggttttaaacgtaccgatttgaatgatacggagcaggactcgaccacgcttgccgtgtcgcgttactgggacctttccagtggttggcagcgggcgattaatctgcgctggagtttcgaccactttacccaggggaacgtcaccaataccaccatgctgttctacccgggcgtgatgatcagccgaacccgctcgcgagggggactgatgccaacctggggcgattcgcagcgctattcagtagactattcgaatacggcctggggctccgacgtggatttctccgtgctgcaggcgcaaaacgtctggattcggactttgtacgatcgccaccgttttgtgatgcgcgccaatttgggctggatagaaaccggtgatttcgacaaagttccgccggatttacgtttcttcgccgggggcgaccgcagtattcgcggctataaatacaaatctatttcgcctaaagatagcgacggcaatcttaaaggcgcctcaaaactggcaaccggatcgctggagtaccagtataacgtcaccggtaaatggtggggggcagtgtttgtcgatagcggcgaggcggtgagtgatattcgccgtagcgatttcaaaaccgggaccggggtcggcgtgcgctgggcgtcgccggttgggcctgtcaaactcgattttgccgtaccggtcggcgacaaagacgaacacggtttacagttttatatcggtctggggcctgaattatgagtttatggaagaaaataagcctcggcgtgttgattttcattgtggtgttactggcgagcgttgcgtttctggtcgggacgacgacggggctgcatctggtattcagtgcggcgaaccgctgggtgccggggctggagattgggcaggtcaccggcggctggcgggacttatcgttaaaaaatatccgctatgagcagccgggcgttgcggtgaatgcgggcgaaattcatctggccatcgggcttgattgcctgtggcgcagtagcctgtgcgtcaatgatctggcgctaaaagatattaatgtcgctatcgacagcaaaaaaatgccgccctccgaaccggcgcaagaagaggaagaaagcgggccgctgaacctctccacgccctggcccatcacgctgtcgcgcgtggcgttgaataacatcaatatcaagattgatgacactaccgtttcggtgttggattttacctccgggctggcatggcaggagaaaaacctgaccctgaaaccgacgcggcttcagggactgctgatcgcgctgccgaaggtcgctgacgtggcgcaggaagaggtggttgaacccaaaatcgagaaacctcaaccggatgaaaagccgcttggcgaaacgctaaaagatctgtttgcaaaaccggtaatgccggagatgaccgatgttcacctgccgctcaatctgaatatcgagtcatttcgcggcgagcagctacgcatcaccggcgataccgatctgacggtgcgcacgatgctgcttaaagtcagcagtatcgacggtaatatgaagctggatactctggatatcgacgccaaccagggcacggtgaaagcctccggtacggcgcagctcgccaataactggccggttgatattacgctcaacagtacgctgaatatcgatccgctaaagggtgaaaagataaaactcaaggtcggcggcgcgttacgcgaacaactggaggtcggggtgaacctttccgggccgatggatgtcgcgcttcgcgcccagacgcggctggcggaggccggtttaccgctcaatcttgaagtcgtcagccaacgcattgcctggccattgacgggtgatacccagtttcaggctgacgatctgaagctcaaactgagcggtaagatgaccgactatacgttgtcgatgcgaaccgccgtgaaaggacaagatattccgccggcgaccatcacgctggatgccaaagggaatgagcggcagattaatctcgataaactcaccgtcgccgctctggagggaaaaaccgaactgaaagcgctggtggactggcagcaggcgattagctggcgtggcgaactgacgctgaatggcatcaataccgctaaagagattccggactggcccgcgaagcttaacggcgtcatgaaaaccaaaggcagcctctacggcggcacctggcagatggatgtcccggagctcaagctgaccggcaatgtgaagcagaacagcgttaacgttaacgggacgctaaagggcaacagctacatgcagtggacgatcccggggctgcactttgcgctgggcccaaacagcgccgatataaaaggcgagcttggcgttaaggagctgaatcttgacgccgccatcgatgcgccagggctggataatgcgctgccaggactgggcggcatggcaaaaggaatcgttaaagtccgcggtacggtagaagcgccgcagctgttggcggatatcaccgcccgcggcttgcgctggcaggagctgtctgtcgcccaggcgcgcattgagggcgatattaaatccaccgatcagatagcgggccatctcaacgttcgcgtagagcggatttcgcagcccgacgttaatatcaatctggtgacgcttgacgccaaaggcagcgagaagcagcatcagctacagctccgtgttcagggagaaccggtatccggtcaactctccctgacaggcagcttcgatcgcgaggcggcgcgctggaaagggacgttaagcgacacccgtttccagacgccagtggggccatggtcgttgacccgcgcgattgcgctggactaccgtaataaagaacagaaaatcagtatcgggccgcattgttggctgaacccgaacgccgagctgtgcatcccgcaaaccattgatgcgggcgccgcaggacgggcggtggtcaatctcaaccgctttgatctggcgatgctgaagccatttatgcctgataccactcaggccagtgggatctttagcgggaaagcggatgtgtcgtgggacaccacccaggagggattgccgcaggggaaggtcacgctttccggtcgtaatgtgaaggtcacgcagaccgtcaatgacgcgccgttaccggtcgcgtttgagacgctgaacctcagcgccgatctgcacaataatcgcgccgagctgggatggctgattcgcctgacgaacaatggtcaattcgatggccaggtgcaggtaaccgatcctcaggggcggcgcaatctcggcggtaacgtcaacatgcgcaatctcaatctggcgatggtcaaccctgtcttttcgcgcggcgaaaaagcggcgggaatgttaaacgccaggctacgtctgggcggcgatgtgcaaagcccgcagttgtttggtcagttgcagcttagcgcgctggatattgacggtaactttatgccgtttgagatgcagccgagccagctcaccatgaactttagcggtacgcgttcgacgctcgccggtatcgtgcgaacacaacaagggcaaattaacctgaacggcaacgccgactggagtcagattgacaactggcgcgcgcgggtgacggcgaaaggcagccgggtgcggattaccgttccgccgatggtgcgcctggatgtctcgccggatgtggtctttgacgcgacgccttcgctgttcacgttggatgggcgtgtggacgttccgtgggcgcgaattgtggtgcacgacctgccggagagcgcggtcggcgtctccagcgatgtggttatgctcaacaatgacctgcaaccagaaacgccgcagacagcgtctattcccatcaacagtaatctgacggtccacgtcggcaacaacgtgcgcatcgacgccttcgggcttaaagcgcgtttgaccggcgatttgaaagtcgcgcaggataagcaggggctggggctaaatggtcaaatcaatattcctgacggccgattccgcgcctacggccaggacctgcttgtccgtaaaggcgagctgctgttctccggcccgccggatcagccgctgctcaatatcgaagcgatccgtaaccctgacgccaccgaagacgatgttattgcgggcgtgcgcgtcacaggcacagctgatgaacccaaagcggaaatcttctccgatccggcgatgccgcaggctgaagcgctttcttatctgctgcgtgggcaggggttggacagcaatcagagtgatagcgcagcgatgacctccatgcttattggcctgggggttgcgcaaagtggtcaggttgtgggtaaaatcggagagacattcggtgtaagtaatctggcgctggacacgcaaggggtgggcgattcgtcccaggttgtggtcagcggctatgtactgccgggtctacaggtgaagtatggtgtagggatatttgactctctggcgacgctcacgttacgttatcgcctgatgcctaagctatatctggaagcagtgtctggcgtagatcaggcacttgatttgctctatcagtttgagttttagcaatgcgaatatttgtctatggcagtttacgacagaaacaaggcaacagtcactggatgaccaatgcccaattgcttggcgattaccgtatcgataactaccagttgtatagtctgggccactatccaggcgcagttccgggaaacggagcggtatacggtgaagtttatcgaattgataacgccacgctggccgaacttgatgctttgcgcaccaggggcggtgaatacgcacgccagttaatccagacgccttacggcagcgcatggatgtatgtatatcaacgtcctgttgatgggttaactctgattgaaagcggtgactggttagacagaaaccagccctgaactgaacacgccaccctcgggtggcgttgttttttacattctggctgatggcgctagcgccgggcatggtgagctcttattctgccgtagatcaataatgacgcgccgcccaggataacaatgcatccgagaaccataaatccctgcatgtagctgccggttgtccggtaaaaatagccgaccataaggcctgccaacgtaccgccgccgccggcgccgatgccattaataataccggaggctgggccaatcgcatggggtttaacgttcgactggataatcgaccagatattgggggtaaagctggcggcataataacccatcgccagggtaatgagcgtgattttaaagcccggcgcatcgacaaatggcaggagaaataacatcacgccggggattagtaggcccagtgaagcaataagtacacgtttttgtgtcttatcactgatccatgagatagggattgccagtataaccgcagtcagataaggcagagaactgaccaatgctttactgaatccggtatagccgagagaattgacaaccatgggtatccataacgtaattccccagaacaacatcccttgagtgatgtaggtaaaaataaggagtaggaagggggttccgcccagcgattccagggtaagtttagttttctctgttggcgccggcgcacgataataaggcgcttcttcctgttttttcagcattgttatataaagtggaaccacaacaacaatgccgatcacaccagtgataataaaaacatttcgccaaccgaaggcagcatccagcggggacaaaatcataaatcccaggcctaatgccaggaactgtccataatactggataatgctgttcgcctgcgtccgttctttgtctgaaaaccagtcgctggcgaagcgggactgctgcggccaataaatgccttcggtaatgccaagcaccagccgacaaatcaaaataacgtacactgacgaggtaaatccgacaaaaacggtcgcaatcgaccagattagcaccatcagaatgactatttttttcggatcgtatcgctgggtaaatacgccgccaaaaatatttgaaaaggcatagccaataagaaatatggttaatacaatgctggccgttgcgccatcaatattcaggtcgtgtgtaatcgtaggtaacgtaacggaaagattagaacggtcaagataagcaacaaaaaggccgaacattaatgtcgcgccgatccgtagccatttttgcattgaggtcatttttcaactccgtttggccgcgcgccaaaatcaatttgacgaaataatatctcaccggattttatggtcatttgtggtaccagcacatgcgtccccgtgagcgtttcaccatgaatatcggcaaattcaacatgcctgttttttaatttaaagatggcgatatcggcaaatgccccaggggccagcgtaccaatttctgctgccatacccattaaaactgctggggtatgggtacaggcgttaatgacatcggtaagcgcgacgccgagtgctaaatatttcgataaaatccatggtaaggcgtaaacaggccaggcgagtttagtgatggttgagagatcgctactgatgatatccggaagaaagccattggcgatggcccggcgtgccgtgttcattgaaaaatggctgtgaccattggcggcatcaaatataacgcctctttcccttgcctgacggacttcggctaagaccacgccttcatcagtaagaatggtgctacctttgccgtgaaacgcatgagcgataatatcgcctcggcgtagcaaggagacaagttctttcatgggaacgacgggatgagtcgagtgtattgccacgggacactttaaatcgttggcaatacgaagggattcagtcagcggttttaagccatattcagcaatgtcctcagtctgaaccttgagttttaatccctgaagaacgttgcgatactgacgaaacagcgcgtggatcttattttcatcaatattgtcaggatcataattttcttgtgaccaggtttggcccggcggcgacacggtcaaaaacgctttgattcgaactttgctggcgcaaatcaccgttcggtagaaggcatcaaagtttgccgtaccggcagaacctgcatccacgacggtggtgacgccattcggcggcatgtacatatcaggcctgacgccgccttccgtcgcgtcataaaaaacatgcgcgtgataatcgataagaccgggagtaacgatcatgccgtcggcatggataatccgggtctccgaagttacaggatatttatcggcatcaacgataatatcgttaatgatgcgtaaattgttaatctcattaatattacgagcgggatcgatgatatgtccaccggtaattaatatatcatttttcatcataatctcttaaaatagtaaataattatggcagcccttaaaaatatattaaaaagtgtgttttgagcggatgttatgttggattaaaaatacggttattggtagggagagcttaggataccttattaaaaaggtaatcgggcttatgcactaaataagactttagcgcttgctaatatttagggcgtaagtccatgggagtctgggagcattcacaaaacaattattatcttaagctttttagagaaaccgtgagcgtattcaaccctttttaataaaaaaatcaggtaaagtattattcattccgtgaatgttaaattaataatgataaaaactgtgttctattcattagccaataaaaaggccctcattactatgagagcctttatcttgacgcttatgtaaaagcgaacttatttcttcgctgcgcgctcgaaggaggcaacgatttccgctttagccgcttcggcgttgtcccaaccgtcaactttcacccatttgcctttttcgagatctttataatgctcgaagaaatgagtgatctgcgctttcagcagttccggcagatcgttcacatctttaatgtgatcgtactctttgctcagtttggtgtgcggtacggcaaccagtttcgcatcttcaccggattcgtcggtcattttcagtacgccaaccggacggcaacggatgacggcgcctggctgcagcgggtacggcgtcgggaccagaacgtctaccgggtcgccgtccagagacagggtatggttgatgtaaccgtagttgcacggatagaacatcgctgtggacatgaagcggtcaacgaacagcgcgccgctctctttgtcaacttcgtatttgatcggatctgcgttagccgggatctcgataacgacgtagatatcttccggcagttctttacccgccgggacgttgagtaagctcatgtctgtttcctttgaatttatgacaaacaagtggcgagtattatagccaactcacgccgaaagtcttcgcttgttttcgtttccgcctcatctggcgcgtcgttgcggagcataaacgacaaaggttaagaaccggaaaaatcacgggcctgataaggcaacgccgccatcggacatgttattgcccaatggcggcttcatgcgttattccgcatggtggtaaaaattacgcgtccgggtattcgcggataaagcgttccacatcgtcaaccatatggcggttgccgacgaagaacgagcggcgctggtgcaggctttccggaatgatatccagaatacgttctttaccatcgcttgctttgccgccggcctgttccgcgaggaacgccatcgggttgcattcatacagcagacgcagtttcccctgcggatggctggcggtgctggggtagagatagatgccgcctttcagcaggttgcggtggaaatcggccaccagagagccaatgtaacgtgaggtataagggcgacttgttgaactatcctcttcctggcagaatttgatgtacttcttcacgccattcgggaatttaatgtagttaccttcgttaatggagtaggttttacccttttccgggaaacgcatacgttcctggcacagacagaacacgcccaacgacggatcgtaggtgaaagcgtgtacgccgcagccggtggtgtaaaccagcatggtggacgagccatacacgacatatcccgcagcgacctgtttgttgccgggttgcaggaaatcttcttcggtgaccggcgtgccgacgggcgtcacgcggcgataaatcgagaaaatcgtaccgacagagacgttaacgtcgatgttagaagagccatccagagggtccatcagcaccacatatttcgcgtgttcgcagccttcaaagacgacaatttcgtcctcttcttccgatgcgatgcccgctacaatatcgcgcgcttttagtgcagctttcagtttctcgttcgcgaacagatcgagtttctgctgaacctcgccctgtacgttctcagcaccgctggcacccaggatatcgaccagaccggccttattgatatcgcggtggatgatcttggcgcccaattttattgccgacagcaaagcagtgagctcaccggtagcctgagagaactcgtgctgcttttcgacaataaattcacctaacgttttcataacactttccctgcaattgattggagtaaagcgaccgtaacaatcttaacaaacatttcagatgatgcgctcaggtgaatcgcgccagcaaagtacagatttacctgaaatgcgtttctcacttgccagacatgtgcgtaaaatggctcgcagataaaaaaaggatagtgacgtatgcgcattcatattttgggaatttgtggcactttcatgggggggctggcgatgctggctcgctcgcttggtcatgaagtaacgggttcggacgccaatgtgtatccgccgatgagtaccttacttgagaagcaaggcattgatctgatccagggttatgacgccagccagctcgatccgcagccggatctggtgattatcggcaatgcgatgacgcgcgggaatccgtgcgtggaagcggtgctggaaaaaaacattccctttatgtctggtccacagtggctgcacgactttgtgttgcgcgaccgctgggtactggcggtcgccggtacccacggcaaaaccacgaccgcaggcatggcgacctggatactggaagcgtgcgggtacaaaccgggctttgtgattggcggcgtaccgggcaactttgaggtttccgcgcgcctgggagagagcccgttctttgttatcgaagcggatgagtacgactgcgcgttctttgataaacgttctaaatttgtgcattactgcccgcggacgctgatcctcaacaaccttgagtttgatcatgccgacatcttcgacgatctgaaagcgatccagaagcagttccaccatctggtgcgcatcgtgccggggcaggggcgcatcatctggccggaaaacgacatcaacctgaaacagaccatggcgctgggctgctggagcgagcaggagctggtgggcgagcagggacactggcaggcgaagaagctgactacggatgcttccgagtgggaagtgtggctggacggcgaaaaagtcggcgatgtgaaatggggcctggtcggcgaacataacatgcacaacggtctgatggcgattgccgccgcgcgccacgtgggcgtcgcgcccgcagaagcggccagcgcgctggggtcatttattaacgcccgccgccgtctggagctacgcggcgaagcgaacggcgtgacggtgtatgacgattttgctcaccacccgacggcaattctggccacgctggcggcgctgcgcggtaaagtgggcggcaccgcgcgcattatcgcagtgctggagccgcgttctaacacgatgaagatggggttatgcaaggatgacctggcgccgtcgttagggcgtgcggatgaagtgttcctgctgcagccgccgcatattccgtggcaagtggcggaagtcgctgaagcctgcgtacagcctgctcactggagtggcgatgtcgatacgctggcggaaatggtggtgaaaaccgcacagcctggcgatcacatcctggtgatgagcaacggcggtttcggcggcatccatcagaaattgctggatgggctggcgaaaaaagctcagaacgtaacagcgtattaaatgactatgcggtcagccagccttgtggctggctgttttatatggggcatcttgccatcgaaagcgcattccgctcgccgggagacgttaaagcaatactgaaaaatcatttgccgctcagtattgaaaaagagtagacgcatatccttaaagtaatcagtgtaatacactaagagtgttccgccggttgccgtatgcgggacgaaaagagccagttcgcaataacagatgaaggtttcgtgatttataaacgtcatcttctgcctttcaacgtttgcgatgccgcctggctgcgggcatcgtccagtcataacaatgctgatcctgtcgcatttatgcggtcagattcagattgctcagaacccagcccgccagcaaattctgtactgaaggtaaccacagcgcaatttgaatgttgttaactgtatgttcagttcatttgtgctaatatggttatttacgaaattttcgttctattagagtatcatgcatgtctaaacatcaaactcaactttccttactgcaggatgatatccgcagtcgctatgacagccttagcaaacgtcttaaacaagttgctcagtatattctggataacagtaatagcgttgcttttgacacggtagcttccatcgcgcaacatgccgatgttcccccttcgacactgattcgttttgctaatgcgtttggttttagcggatttaatgaaatgaaacaggtatttcgccagcacctgatggaggaaacagtaagctataccgagcgggcgcgtctgttcagacagaaaaatgcggatgaaggggaacctaccccggaaaagccgggtgaaattctgaagctattttcaatggtgaatgcacaggtattacaacaattaccggtgcagattaaaaatgagcagttggatgcggcggtaaatctgttagcgaaagccgacaatatttatgtgattggattacgtcgttcgtttagcgtggccagttatttaacctacgcattgcgtcatctggagagacgggcatttttaattgacggtattggcggaatgttctctgaacagctaagtatggtcagccccgacgatgtcgttattgccatcagctactcgccttacgcgcaggaagtggtggaattagtcgagcttggcgcgaaacgcggtgcgcaccatattgcgataaccgatagccaggtcagcccgctggcagcgttcagtgaagtctgttttgtggtacgtgaagcgcaggtcgatggtttccgttctcaggtcgcgtccatgtgtctggcgcaaacgttagcggtttcactggcgctggcgacggagtaaaaaaacaagccgatgatcgtatttagcgatcatcggcattgtggtgaaacttaatcagaataacgttcggtttgaattggctgcagtttttttctgcgttttgctaacactacgctctccattttctccagcgaaatgccttttgtttccggcaggtaacggcagataaagaagtaactgaagatgcagcagatggcaaatatccacattggaaatgcgccgtggaaatgcgaaagtaaatacgggttttcattaatcatcgggaagaattgcgaaactaaaaagtttgccatccacataaatccgaccgaaatactcattccctgcgacctcatccggttagggaatatttcagaaataagcacccatgcgcccacgccccaggaaagcgcgtagaaaatcataaagaacagcataccgaatagcgcgaaataaccggttgcctggctgtacagcgcccatgaggtgagcaacaagccgatgatgctgccgatagtgcctttacgcatcagcgacaaacgccccatcttatccataatcattgcgccaataatggaaccgataagctgaatcacgccgatccagattgtctggaacagggcctcctgggcgctaccggtcacatccttaaggacgattggcgcgtaatacatcatgacgttaacccctgttacctgttgcagcatagcgatcatgcagcccaggatcaggatgaaacgcacgttcccgtcgcggtaattgagtttttgatgggcgtttagttggtcattttgcagtgaggtttttatatcggcaagaagatgtctggcatgttcttcgttggatattttggtcagtatttttagcgtctcctcctcgcgaccaatcatcatcatccagcggggagattccgggattaaaaagactaaaatacagaacaaaatgcagggaataatacccgcagcaaacatatagcgccagccaagttcaatgagccaggtatccgctgcaatcgatgctattttgtagttaacgtagaagatcagaatctgaccgaaaacgatagcgaactgctgcatacttaatgctctgccgcgcatgtttttcggtgagacttcagacatatacatcggtgatactgttgccgccaggccgactgccagtccaccgataatgcgataaatcacaaaatgggtgaacgtgtaggagagggaggtgcccactgcggaaatagtgaataacagcgctgaaaccatcaatgatttcttgcgtccaaaacgtttggataaatatccggcgctaaacgaaccaataacgcaccccaccacaacgcaggaaaccgcccagccggtctcagcaggagatagatgaaagtagctggtcagtgaaccaatcgcacctgaaataacagcagtatcgtagccaaataatattccgcccagtgcggcaatcgcgcagatgcgtaatatgtaacccgtattataacaactatctgatgtggacataggtagattatctccagaataaacttcatctatctgtttgaatttagtgaacaaatagacaaattcatcttatgtcggtcattgccgtagcgctgccgacgatcttatagctattgagaactctcgtttcacaacctatgttttaatttcaaaacgatcaataatgaaacttatgttttgttatgggtatcacatttcgaatttcataatcctggcgttttttatcgttaagatgctgcgttttacgcagtgctctcctctatcttgatgaagttacttgattttattgatttcgcgacagtacctgaactcaatttgtcaggggccgtactttttgttctttcctggaacatctccatttcgtgatcttttgcatggaatttttcttctaatgaatgcaaaaataaaatgaaaaatttcattggtgtgttgtttcctcaacaggcaagggagggattatgtctcagagaagtaagtacaattcggcctatgtgtacgtcctgtgttgtattgcggcgctggctggattgatgtttggttattcaacggcggtgattaccggagtggtattgcctttacagcagtattaccaactgacgccaaccgagaccggatgggccgtttccagtatcgtgattggttgtatcatcggcgcgctggtcggtggaaaaattgccgataaactggggcgtaaacctgcgcttctgatcattgcgatcatttttatcgcttcttccttaggggcggcgatgagtgaatcgttcatgatcttctccctttcccgcattgtgtgtggttttgcggttgggatggccggaacggcatccaccatgtatatgtctgaactggcgcctgctgaaattcgcggcaaagcgctgggcatttacaatatctccgtggtatctggccaggttatcgtgtttatagtcaactatctgatagcaaaaggaatgcctgctgatgtgctggtttcccagggctggaagactatgctttttgcccaagtggtaccctccattgcgatgttagcgattacgcttttcctacccgaatcaccggcatggtgcgcccgtaacaaccgcagcgaagctcgttcgataaaggtgcttacccggatctacagtggattaacggccacagatgtggccgctatttttgacagcatgaaagaaaccgtacgttcacaggacaacgtcgccgggggagaacgcaccaacctgaaaagctcgccggtgctccgctatattctgttggttggatgctgtatcgccgttttgcaacagttcacaggcgttaacgtaatgaactattatgcgccgctggtgttgcagaacagcagtaccgaagtggttatgttccagaccatttttatcgcggtatgtaatgtggtgggcagttttatcggcatgatcctgttcgaccgctatggccgtataccgattatgaaaattggtaccatcggctcaattgtcggcctgttgatcgcgtcatacggtttgtacacccacgatacaggctacattaccatctttggcatcctgttttttatgctgctgtttgccgtcagctggagcgttggcgcatgggtactgatttctgaggttttccctgaaaagataaaaggttttgggatggggctggcggtgagtctgatgtggatagccaacttcctcatctcactgttgttcccggtcataaatgataacgcctggctgcaggagaccttcggcggcgctttctcgatgtggatttttgtcgtctttaatttggtctgctatgtctttatttctcgttatgtgccggaaacaaaaggggtgccgctaacagaaattgaacggctggccgagaacaagctgcgtgaaattcaggggaaacgtcgcgatgtaatagcctgatacctctccaatattagcggagaatatccagagatattctccgctggttacacaacctttactccctccagcgagtgcgcacaggatataccctgttgaaacctccccagtgtttaccacctctacgtaactaattgatccataataatatcggcaaatagggtaagtcttcttctgcatcattattttattgcgtattcctggtgggggccgtgccgtaaatacgctatatacaaaacagggaaataatttaagagaaggcggatagcgatcttatgagcgtgtgtggcgcagagttgaataaaaaagccagccgcagaggacggctggcaaagtaccactcaacgaagtgttatcgcgggtagtctggtgagttaatccacgcgtggttctcttcccaggtgaaacgccattttcgtagcgggccggccatcacgttcagatagtagttatcgtaacccgcgatggtggcaaccgggtggtagcccttaggtactttcactacatcccggttatagaccgccatacattcatccaggctgcgatcgtcggtgtagacgcgctgtaagcagaatccctgaggtggattgaaacggtgatagtacgtctcttccagataggtctcctggccttcaactgccgtatcgtgcttgtgcgcgggccaggagctggtatcgccttcattagtgtacacttcaacgactagcaggctgtcggcgagctggctatcaggaaggatgttatgcaccaggcgctgattgcgcccttttccccgatgctctaccccgacctcttgtggcgagatcagacgtaccggaagctctccgaatcccggcgcgctgcatacggccagctcaaggtcggtttcggctgtcactttcgcctccgtatgatgggggaggtaaaccgaataagccggaatgcgttcaaacggactcatgcgctgaccaatccgatagaaaaaactgtcggcggccttaacgctggccagcccggcaaccagcaccagacagcgttcacgctcatcggacggcagggttatcgactctccagccttcaactgccagacatcaaaaccgacatactcccagcctgcattttgaggggaaatgtgttggatatttcccgactcagaggtacaggtactcagcaagttggccataatcttctcctccctgaaagcgtattaaccgagagtcggcatactgaactccgatacgatctgctgtccgttcggccaacgcgaggtaacggttttcatccgggtatagaagcgcacgccatccggcccatggacgttcagggcgccaaacaccgagcgcttccagccgccaaaagagtgaaatgccatcggaaccggaactggaatattaataccgaccatcccggcttcaaccgactgggcgaattcgcgcgcatagtgaccgttggtggtgaaaatcacgctgccgttgccgaattcatgggagtttaccgtgctaatggcggtggcataatccgggacgcgcacaattccgagaaccgggccaaaaatttcttcacgccagatggtcatctcaggcgtgacgttatcaaacagagtgccgccgacataaaagccttcaggatatcccgccacgctatagttgcggccatccatgaccagagttgctccctcgctcacccctttgtcgatgtaacccaacactttctgttgatgagcacgtgaaacaaccgggcccatttcattttcatctttgccgcgcagctctcccgggccgatacgtagcgccgcaatcagcggtttcaggcgttcgatcagacggtccgccgtttcatcgcccaccgcgaccactaccggcagcgccatacagcgttcgcccgcggaaccaaatgctccgcccataatggcgttgacggtggcgtccagatctgcatccggcatgacgattgcgtgatttttggcggccccgaaggcctgtacgcgtttgccatgggcgctggcggtggtatagatatgttccgcgacggcggaggaaccgacaaagctgacggcctgtacgcgagggtcgctggtcaacaggctagccgcctcattgccacagtgaacaacgttaaacacgccgtccggcaggccagcctcctgcagaagctgcgccatacgtaacgatgcggacggcaccagtgcgggcggtttcaggacgaaggtattgccgcaagccagagcaaccgggaacatccacataggcaccattgccgggaagttaaacggtgtgatgcctgccacaaccccaagcggctgcattaatgaaaagctgtcaacgcctgagccgacgttaaaggagtactctcctttgctgaggtgcgggatcccgcaggcaaattcgacaacctctatgccgcgcgtcagctcgccaagcgcatctgaccagaccttgccatgctcgctgacgatctgcgccgccagttcgtcccgatgcttttccagtaatactttgaattcaaaaaggatacgtgcccggcgtagcggagtcattttactccatgccggaaaagcctcatgtgcgctttgaattgccgccagcatctcctctcgggtgctctgggtgacctgacgaattactttaccggtggccggattagtcaccggtagcgtctcgccgctgctgctcagtgtcgttttaccatgaataaaattgccgactgtttccatctcttttttatcctcttaaaccgatgttgacgacgttctgactgagcggtcacaggaaagcctggttatcttcagcctaaaacgcataccgtattcaatgtaaattttaggattaaaaatttcaaatttatttttatgaaattttattttgaaagtttgacggctgatttttatacgagggtatgtgcagcaagaaatcaaaaatataattaacttattgatttttatcgtttttatttggtgtgtcatcaatggttgtctgttgtgacgaggaaagatttggaaaaaattatgatctatatagcatttttgtttcatttggtgtggtataaaaattcaaatttcagggggggttcggcaccacagtttcggatattggagggtaaatcatgcgcttgtgcttctgtccttcagaacgagagaataaggctcagccccagttggcgtatgtgagtcaggtcagtgagagcaatggtccgtttgtccggttcatgcatatgcacccacagaccgttgaactgattcttatcaccgaaggagacggggagtatttcattggcgatcgcatctacccagttcgtaaaggcgacctggtcatttataacagccaggtggtgcatgatgagtatctggaaagcgggcggccaattggcactatttgttgtgggattaacaatatttcgtgtccgggtctacgtgagaatgcgctaataccggatgatattgtgccggttattccactgtatcaccattatgcgacggtggaaaaactgatgagctccgtgtttaccgttattaatcagcatgcggtagaagggccagcaatggcgcagctattgacccaggtagtactcaaatacattgagggaaatgtcttattgcgcacaggtaacgatgccatacagcgccatgaaaatttacttgattcaataaaatcctatattgatcgcaatttctatgagccaattcggctggatacgctggcgacgaaatttaatgtcagtccttattatgtttcccatgaatttaaacgccgctatggttattcaccgatggattacctgataaaacgtaggctgggggaggcgcaatcgttactaaccacggatgaaggcgggcgcgaaaagatcacctctattgcttatcgtgttggctttagcaaccttagtcattttcagaattacttcaaaaataaagtagggaaaacgcccggtcaatatcgcaaggactatcgtaaagctaattatttattatttgaatattaatgcttgctaaaatttaatcgtcatgagaatggtcgcaatactgcggccattttttatttgtcggtatattttatgcgtttatctatagcgcgaaaagtctggcaatatcattaaagagtgatgatttttttgtgatacctgacgcatttatcccacttcttcaaccaggatagataaagtttttcaggctacaaaaagtaatatgttgtccatcaaaggttaatttgcatcgcggtatgcagtaaaagcgtttcattaagtgggagccagcaatatgtacaatgtaaaaaagagcattaagttggggattgcgcctatcggttggcgcaatgatgatattcctgagattggtaaagaaaatacatataaacaaatacttagtgatgccgcgctcaccggtttttccgggacggaagttggcggttgttatccgcaggatcctgctgagttaaataaagagttaatgcttcgcggactggaaataccaggccagtggttttcttcctttattattcgcgatggtattgcatctgcgatgaatgcttttgaacagcattgtgcttatttgcaggcaatacatgcatatgtcgccgttgtttctgaacaaacttatagtattcaaggcattatcgataagtgcgtttatacagagaagcctaacttcagcgacagcgaatggcagcttttatgcgaaggacttaatgcgcttgggaagattgccaatgcgcacgggctgaagctcgctttccatcatcatatgggcaccggtgtgcagactctgccagaagtggatcgactcatggagaataccgatccgcaatttgtacatctgctgtttgataccgggcatatatatgtttctgacggcgatgtcatgccgctactgagtaaacattttgatcgtattaaacacgttcattttaaagatgtgcgtaatgaaaaactcaaagcatgtcgcctcgcgaagaaatcattcctcaattctttccttgatggtgtgtttaccgtccccggcgatggaaatattgattttaaatccgtattagcttatctggtcgggcatcaatattctggctggattgttgttgaggccgagcaggatcctaagaaatataacccattggaatatgcgcaaaaaggtaaaaagcatattgatgagttactgaaaaattatctttaattgaaaaggaaacagaaaatgactttaaaagcaggtattgtaggtatcggcatgatcggctccgatcacttaagacgtctggccaacaccgtgtcgggtgtagaggttgttgccgtatgtgatatcgtcgcgggtagggcgcaggcggcgctggataagtatgcgatcgaagccaaagattataatgactatcacgatctgattaatgataaagacgttgaagtggtcatcattaccgcatcaaatgaggcgcacgccgatgtagccgttgccgcgctaaatgctaacaaatatgttttctgtgaaaaaccgctagcggtgacggctgcggattgtcagcgtgtgattgaagcagagcagaaaaatggtaagcgcatggtgcagattggttttatgcgccgctacgacaaaggttacgttcagctgaaaaatattatcgacagcggcgaaatcggtcagccattaatggttcatggacgtcattacaatgccagcacggtgccagaatacaaaacgccacaggctatctatgaaacattgattcatgaaattgacgttatgcactggctgcttaacgaagattataaaaccgttaaggtttacttcccgcgccagtccagcctggtgaccactctgcgtgatccgcagctggttgtaatggaaaccacctccggcatcaatattgtggttgaagtatttgtgaactgccagtatggctacgacattcactgcgatgttaccggcgagaaaggaatggcggagctgccaaccgtcgccagcgccgcggtacggaaagcggcgaagtatagcaccgacatcctggttgactggaaacagcgctttattgatgcctacgacattgagttccaggatttcttcgatcgtctgaacgcaggattgccgccggcaggcccaacgtcatgggatggttatctggctgcggttaccgctgatgcctgcgtgaagtctcaggaaacagggaataccgagattgttgaattaccctcaaaacctgatttctacaaataaaccttccgcgtattaaaactcctgccggatagcgatgcttaagcgtcctatccggcatatcacaatttattatcttcttttatccggaacttccctatgaaaggcagactcatctcttccgatccgtatcgtcagcaattccttgttgagcgtgcggtctctttttcgcatcgtcagcgtgattgcagtgaattaatcagcgtcttaccgcgccacgcgttacagcagattgacggattcggcggcagctttaccgaaggtgcgggcgtggtattcaacagcatgagcgaaaagacgaaggcgcaatttctttccctttatttttctgctcaggaacataattacactctggcgcggatgccaattcagagctgtgatttttccctgggcaattacgcgtatgtcgattccagcgctgacctgcagcagggacggctctccttttcccgcgatgaagcgcatttaataccgctgatttccggggcgttgcggttaaatccacacatgaagctgatggcttcgccgtggagtccgccggcgtttatgaaaactaataacgatatgaacggtggcggcaagctgcggcgcgaatgctacgccgactgggccgatatcattatcaactacctgctggaataccgccgccacggcattaatgtgcaggcgctctccgtgcagaatgagccggtggcggtaaaaacctgggactcctgtctgtatagcgtggaagaggagacagcctttgccgtgcagtatctgcgtccgcgcctcgcccggcagggtatggatgagatggagatctatatctgggatcacgataaagatggcctggtggactgggctgaactcgcctttgctgacgaagctaattataagggaattaacgggctggcattccactggtataccggcgaccatttttcgcaaatacagtatctggcccagtgcctgccggataaaaaactcctgttttccgaaggctgtgtgccaatggagagcgatgccggtagccagattcgccactggcatacctatctccatgacatgattggtaatttcaaatcgggttgtagcgggtttatcgactggaatctgctgctgaacagtgagggcgggccgaatcatcagggtaatctgtgtgaagcgcccattcaatacgatgcgcaaaacgacgtgctgcggcgtaaccactcctggtatggtattggccacttctgccgctatgtgcgtccgggggcgagggtcatgctttcttcaagttacgataatcttctggaagaggtgggatttgtgaatcccgacggcgagcgtgtgctggtggtgtataaccgcgatgtccaggaaaggcgttgccgggtgctggatggcgataaagagatcgcgttaacgctgccgccgtcaggcgccagtacgttgctatggcggcaggagtcgatctgaatgatgaagctgggatttaatgaagcgacctgtatgcgaaactccacgctggcacaggatgttgtgttggcggaacgttttggctatgactacatcgaaatccgtctggatatgttgcaggagtggttgcagaaacatacgttaagcgagctggcagacattttcgccgtcggccaccttaagccctggggctacaattcgctggaagacattacgttttgtgatagcgaaagctgggcggagaaactgcggcagttggctttcgcctgccatgctggctcagtggtggggggtgattgtctggttgtggtgcccaccattcgtcaggggggaaattttccgccaggggaaacggtgaaagattcagtgaagcgtctgcgcgagatggcggcagtggcggaagaaagccggatgcggctggcctttgagccgatcggttccgcaggatgctgtgtgcgcagtcttgccatggcgatggagatcgtagatgcggtcgatcgcagtaatgtcgggctggtcgtcgatgcctttaatctttacctgcacgatcaatggcgggatctgaccacgcttcgccagatccctgtggaaaagatcttcgtttaccatattgatgacgccgataatctgccgctggcaacgctggagcattgccatcgtctgtttcctggcaacggcgtgatcccactgcatgagatcacgcatgagctagtgcagaagggctatgaggggatctgttcgctggaactgtttaaccctggctactggcagatggcggccagcgaagtctttgcgataggggcggaaaagactcgccccttcttaacagcttaatgttgccgcagcaagagatggacaaccgccgcgcccagcagcgcgcaggccgcggccagaagaaagacctgctgatagccgataaacggcgtcagcaggcccgctattggtccggtaaatccgtaggccagatcctgaaacgctgaccagacgccgagggccgtaccacgaatctccggtggcactctgcgcacaacctctacgcccagcgatgggaacatcagcgaacagccgcagccggtaatcgccgcgccaatcagcgcagcgcctgctgacggagcggcccacattaccgccagtccggtcccctctaccagtagtgaaaaggttgcgaccgtggcgccgccgtaacggtcgggaaatttggcgcagaaaaagcggacagcgataaacgcaatgccaaacagcgtcatcgcaaaaccggtgttatcccagtgacgctcgttgaaccagagggcggtaaacgcgcttagggtggcaaaaccaatgccctggagcacaagccctgttccgggccgccacaccaggccgactacccgtagcactggcacgcggggacgggctgttgggatattccccggaatgccatagatgactccgctggcgatgatcggcaacagcacgacgaggagcgccggaagcgccaggccggccctggcgtaaagcgacagccccagcggcgcgccgatagccagcgcaccgtaggtcgccatgccgttccaggaaataacctgacccgcgtgggtcgagcccgccagccacatcccccaggttaaattaccggtcaaaatgaaactttcaccgatgcccagcagcacacgaccaacaatcagtatggcccatgcgagcagcggaaccgggtgagcgattagactgaccagcatcagcagacctgatgcggcgcagtagaactgaccggtgataaccgtccgacgtccgcctgacgtgtcggcttttcgacccgcggcgccccgggtaagcaaggtggcgataaactggctgcctaccgcgataccgatcaacagatcgctcagatgcaactgctgctgaacgtacagcggcagcatgactaacgggatgccaatagtcagatagttgagaaacatcgcggcgctgatgcgaaacagcgtgatcgatgtggaatgttgtgtgagagctggcatggaatcgtccttgaacacgccccttgtccgatgcagacacggggcgtgatgaggcaggcattaacgtgccgggcggtattcgcgccagtagtcgataagcatgcggtatttttgtttcaccgttgcgatgagctgttcatcgttaagctggccgcctaaccactggcgtgacggttcgccaaagatggtccggccgacggcgaaacctttcacccagggcatatccgctgctgcggcgaatcctgacttcaactcgctttccggtgcgtccaggccaagtatcaatatactgcgacattcagggtcataatgctcaatatgctggctgatttctcgccaacgatctgggcttaacggcggcagtttccaccagtccggcaggatccccagttgataaaaacgttccacaatctgaggatagtattgctcattttggtctgccgcatcgcgcggcaagatgacttccagcagcagatcgtgaccagactggcagcaggcgcggtaaacctcgtcaatgagcgcctcttgttcaagacgtaccgactctgcatcgagtggatgatagaagaccagacatttcacgacgtgctcttgcggccagctgacaagctgagagccaatatcgccatgttccagcttcagcggatacgaaccgggcatctcaaccggtcggccaatccaccatccctggccggtcacgtcgttaagcgcctgctgaccaaaggtggtatcggcaaggatgccgctattattctgtaaaccggcctcaagcgccgcctgacgtgccccttctagcagtagcatcttcaggggggggatcgcggattcactggcgccgacttcatttgcgatatccaccagttgcttgcgatggtcaaaggcgaatacgcacagctccggccagtgctgtttacgggttgtgacccgatgaaggtgattcagccgcgggtctttgtctggccgggtgatggattgttcacgcgcgaggtagtcgtccagctcttttttggttggcatggcgggggcacaaccgtggcgcgataccactaacgcgccgcaggcgtttgcataacggcaggcttgctcccagctttcatcgttcaggtatccccgcagcagtcctgacataaaggcatcgcccgcgcccagaacgttcagaacgtctacgcgaacgccgctatgtatcttcacctgcgaccagtcatcggcgatgttgccttcaaagactgagcagcccagcgcgccgcgtttgcacaccagtacggcctgggtcaactgacggacgcgccgcagggcggtcagcgtgtcggtactgccgccggcgatatggaattcttcttcggtcccaacgatcagatcgaaatggcgcaatacctgctggagctgttcggtaacctgtgatgaggcgatgaaacgcgtttcaccgtctcctagcgacgtcaggccccacagtacggggcggtagtcgatatccagtgcccgccgcagcccgtgtttttgcgcatactccagcgctttaagaacggcggcgcgcgtattggggtgagaaagatgggtaccggtgacggctaatgcgcgtgaagaagcgatgtaatcttcgcggatatcctcaggtgttagcgccatgtccgcgcagttatcgcggtagaagatcagaggaaaggtgtcctgatctttaatgccgaggatcaccagcgcggtcagacgatcgcgatccgacagcaggcactgcgtatccacaccaacgcggtttaattcttcacgaacgaaacgtcccatatgctcatcgccgacgcgggccagcatagcggaacgtaatccctgaatggccgtgccgtaggcaacattgcctgacgatccccctaaatatttagcgaaagtcgtcatatcctccagccgtgacccgatttgttgaccatacaaatcaacggcgactcgtcccagacagataacgtccagcggcttttgctcactactgactgctttattcattgacatatcccctaacagaagacggtgttatttttgctcatactaaggtttggtgatttcattttcaataaaaatggaaataatgttttcatttattgtttgaacaagatcacagaaatggcatttccgggcaacgggcatgatcgttttttgttgtgttttttgttttaattgattgattataaatgtgttatttattttaaaatcgtatggaagataaatttcattttcatgaaaaatacgcctgaatgtcgaaattttttaaccgttttttgatctccttcccataaatgaaatataaattccatatgattgtgagaacggaaattttgatcctatgataagtctctgtgtttttggggctgaagcgatgcataagcaggcaacgacagccgaacggttgataaaagcaggtggggtacatgaaaacaatcaggttgaccatggcgcaggctttggtgcgctttcttgataatcagtacatcgacgtagacggcagcgaaatcaaatttgtaaaagggattttcgccatttttggccacgggaacgtcgtcggattggggcaagcgctggaagaggactgtggccaacttagcgttcatcaagggcgtaacgaacagggaatggcgcatatcgcgacgggatttgcccgccagatgcgtcgccatcagatttatgcctgcacctcctcagtggggccaggggccgccaatatgatcaccgcagcggcgaccgcgacggctaaccgtattccactgcttttgctgccgggcgatgtgtacgcatcgcgtcaacccgacccggttttgcaacaggttgaacaagaacacgatttgacgctgagcaccaatgacgctttccgtgcagttagccgctactgggatcgcattacgcgtccggaacagctaatgagcgcctgtatcagcgcgatgcgggtgttaaccgatccggcggatacgggggccgtgacgctttgcctgccacaggatgtgcagggtgaagcctgggattatccggattattttttcgctcgccgggtctatcgtcttgagcgtcacgcgccgacggagccgatgctgaacgaggcggttgcgctgattcgccgccaccagcggccgctgatcgtttgcggcgggggcgtgaagtactcgcaggctgaagaggcgctgctgagatttgccgaacgctgtcatctgccgattgctgaaacccaggctggcaagggagcgctcagttctgcacacccgctgaacgtcggcgggattggcgaaaccggttcactggcggcgaatctgctggcgcaggaggccgatctgattatcggtgtagggacgcgctataccgatttcaccacctcctcaaagtggatcttccagaatcccgacgtgcgctacttaaatatcaacgttagccgctttgatgtcttcaagctggatggcgtacagatgcagggtgacgctcgcgtcgccctgacgcagcttagcgaacggctggcccaggagcattatgcttcgcaatggggtgagactattcaccgcgtccgctcgcaatatatggcggaagttgagcgcgtctatgctgtggaatatagcggagagggcttcaaacctgaaattgaggatcatatggatactcaaaaggtgtttgaagagtttaatgagattacgcggtcgtggctgacccagacgcgcgtgttgggtgtgcttaaccggatgttgccggaaaacgcgctggtggtggcggcggcgggcagcctgccgggcgacctccagcgtgtctggcaaagccgcggcgagaatgattaccacgtcgagtacggctactcctgtatgggctacgaagtcaatgccgcattgggggccaaactggcgcagccggagcgcgaggtgtacagcttcgtgggcgacggttcgttcatgatgctgcactctgagttggtcacttccgtccagatggggaaaaagattaccgtcattttgctcgataacatgaccaacggctgtatcaataatctgcaaatggaacacggtatggacagttacttcaccgagtttcgtttccatcagcaggagagcggtcgtcaggaaggcgggtttatcccggtcgatttcgctcgcatcgctgaaggatatggttgtaaaagctatcgcgtcaccaccattgaacaactgcatgaagcgttggaagatgctcgtaaacagaccgtgagcacgctgatagacataaaagtgcttcccaaaacgatggtgcataagtacctgagctggtggcgcgttggtggggcgcaggtatcccgtagcgaacgtatccaggcggtagcgcgtatgcttgaagaacatatcggacaggcccggcagtactgattaatttgccgtcgttcaggttgcagaagtgtggttattgttctgcaacctgaacgatacagcgtcaacgcattgtttgcttttcagaacggcaaaataaaacgatccgtttttcgcagaactacggatgcttttcttttgcggttttaaatttactattcatgagattaagaggtacgaatgaaaaagcttcgatgtggtgttattggcctcggtcgggtaggtaaaatgcatgttgagaatatgtatttactgcctcaattagatattatctgcgccgccgattattttattgaggagatgagcgattggctttattcggtaaatataacttcagggtataaaaattatcaggaacttttacagcgtgatgatatagaggcagtttttattttcacctcaacggatatgcacgaagagatcgtcacggcggcagcgcaggcggggaagcacattttttgtgaaaaaccgctcagcatgaatgaggatgagcaggcctcaatggcggtgctgagaaaagtgaaagagaagggggtgacgctgcaggttgcctttaatcgccgttttgatcctcagtttcacgaggtctttgagctggtgcgcagcggcaagattggtcggccccagatgataaaaatcacctcccgcgatccggacctgctaccccatgatctgatcaaacgtattggcggtctgatttttgacttcaccatgcatgactttgatatggctcgttttatgatgcaggatgaagtcagcgaagtctatgttaagggcaatacgctgattgatcccagcctgaaaaatattgatgatgttgatacgcttgcggtgatgctgactttcagaaacggcggctacgcgctcattgataacagccgtcgggcggtatatggctatgaccaacgggtggaggtttttggctcagaagggatggcgtatgcggataacgttagtgagtcgacggtgaaagttttcaacagccagcactgcataatgaaaaatccccttcctgatttcacggtccgttatcgcgaagcttaccgaacggaaatattacactttattgattcagtcctgcatcatacgccggttgtctgtaccggcgaagacgcattattggcccagcgtatcgctattgccgcgcagcaatcattaaaaagcgggctgccggtgaaaataacaagcgatatttatctttaactgcatctattaataatgaagaaactctcgcactgaaaagtgtgagagcttttctataccgaggataataaaatgaaagaaatgcaggcaacgctgccccagacattttatataaaaccaggtaagtttatctggagctacctgggaacatttttatttatgttgggcggctgtattgagaacagctggttatctgcctggttaaatacgcaggggtttgatcaggcgcatatcgggcagatttttgccgggtatgggattgtggtcgcgattacctcctggctatccggcgtctgtgtggacgtttttggtcctaaaaaggtgatggttaccggttttatcgtctatcttctggcttccgtcgcgtttctgaactttgcgctacccagccatgattttggcgcaattcttgttacctatatgctgcgtggcgtggggtatccgctggtctgttactccttcctggtacgcctgaccatccagttggataatcaccagcaagggatcggcacctcgctattttgggtggtctataaccttggttttaccatcattgggccggtggtggcggcgtcgttaattcctgagttggggcatatcaacgtgatgtgggccgggatgggcgttgcgctgctgggggttctcttcatgctggtgctggaacgcaatgaattcattctgaaaccgcgaacgacgccggtcttcaaagagttatctgcgggtatctccattatgtatgaacggccacggatcggtctggcggtgattgtcaaaactattaacggtcttggcacctatggttttgttgtcgtattacctctgtttctgctggataagcactttacgcttgaggaatgggcgagtatttgggggattacctttatctctaaccaggtcttcaacattatctttggctggatgggcgataaaattggttttcgccgaaccatccagatttttggcagcatcctgaccggtgtcgctacgctgattgtttactgggtgccgatgatatgggggcataactatgtcgcctttatgctggcgatgtgtttgtggggagccgggctggctggctttgtgccaatgacgccgctggtgccgatgatggcgccggataagaagggggcggcgaactcggccgtgaactttggctccggcctggggaatttcgttgggccagcgctggtctccgttctggcagggttcggcaccggcgtggtgatgtatactatggcggggctctatttattcagcggcatcctggtgcagtttcttaaagtgcctggcgagaaatagcttcaaatattcttcaaaaatcccttatagcctgtgatgttcatcactaaattaaaccggtttttatcaagattgataaagccggttttttcaccctacgttaaattgtactaacggattacggttatttacccactcatatacgttcagggagaaaataatgaatatcgaaaaaacacggttttgtattaaccggaaaattgcaccgggtctaagtatagaagcattctttcgactggttaaacgtcttgagtttaataaagtggaattgcgtaatgatatgccaagcggcagcgttactgatgacttgaattataatcaggtgcgtaacctggcagaaaagtatggacttgaaattgtcacaattaatgcggtctatccctttaaccaactgaccgaggaggtagtaaaaaaaacggaaggattattacgagacgcacagggagtcggcgcgcgggcattagttctttgtccgctgaatgatggaacgattgtgccgccggaggttacggttgaggcaataaaacgactgagcgatctctttgcccggtatgatattcaggggctggttgaacctttgggattccgcgtaagttcgctgcgttctgccgtctgggctcagcaactgatccgggaagcaggttccccctttaaggttttgctggataccttccatcatcatctgtacgaagaggccgaaaaggagtttgcgtcgcgcattgatatttctgctatcgggctggtgcatttgtccggtgtggaagacacccgaccaacggaagcattggctgatgagcagcgtattatgctgagtgaaaaggatgtaatgcagaattaccagcaggtgcagcgtctggaaaatatgggatatcgcggtatttacgcttttgaacctttttcttcccagttggcttcctggagtgaggcggaaatagaggaacaaattaatcgcagcgtgtcattgctgctgcaatgatacagctaatttccaggtgaccgttttcagtttccgcagcgtggtatttacaatgaaaattgcttttgatgtcgatgttattaaacatttacccattacccaaatggtacggcaggtttccgagtgggggtataaatatattgagcagtcgccgcacccgcgtattaatccgttttataaacaccctaaagctggtcgcgataccatgcaggaatataaacgcgccttgcagaactacggtgtggaaatctcgtcatttattgtggtttatcgttggtccggccccgatgaagagcgtcggcgcgccgcggtaaccaactggaagcggatgattgagattgccgttgatatgggcgtacaggtgattaataccgagctttccgggacgccggatgagccggagatttgtgaagagatgtggtatcgctccatggaggaattgctgccgatcgtggaacgagagggaattcgaatcgaaattcagtctcacccctgggatttctgcgaactgaacgatgagacggtcgacatggtgcagtctttgcgtagtgataacgtgacctatctgtacagcgcaccgcatggcttcttttacgataaagggcagggcgacgtcgcaaggatgctgaactatgccggggccgatctttcgcatgttctgctggccgatacgcacaaccacacgcttccctgccgctatatcatgaacccgcctggcgtgaatgcgacgattcatcagcacatcgggctgggagaaggtgaggtcgattttgacgcgctattccaggcactgcgtgaaatggattttgcaaaccgcacgtttaaggtgggcggtgaggcaattatcaccacgtcgctgtttggttatcctgagaaaatgagtgttcaggcggtggaaacgcgcgagcggatcgagcgggagctactcggacgttaaaaacgggtggatttgcctgtaccgcgccacaggctggcgcggtcatttgcggcaattacccttcgttttccgccagctcgcgcagatactggaagatctgacgcgctgatttcggcggtttgttgccttctttctctttcttcgcattgcggatcaatgaacgaagctgttgacgatcggcgtgcggccacagggtcagtacttcggctaccgcgtcatcgccttcgacgatcagacgatcgcgcagatgctcaagtttgtgaaacagcaccacctgctgattatggcggttcttcagcttgtccagcgcctggcgaataggttcaacgtcgcgttggcgcagcatttttccgataagctgcaactggcggcggcgtccttccattttgatacgctgggccagttcaatggcgtcgcgcagatcggcgtccagcgggatcttatccagcgcgtttttccccagatccaccagttccgcgcccaggcgttttaattcctcggcatcgcgtttaatttcacttttactgacccagataatttcatcgtcttcgtcttcgatgtcatcaccgggaacgtcgtcgagccagtcttcgggctgctttgtcatgtcaggctccttaaaaaaagaggctaatgttaccagttaagatgcgcactgaaaaacggttctctgttagacttcagagaaactctctctacattatggcatttgcaatgaaagtaatctcacaagttgaagcgcagcgtaagattctggaagaagcagtttcgacagcgctggagttagcctcaggcaaatcggatggggcggaagtcgccgtcagcaagaccaccggcattagcgtcagcacccgttatggtgaagtagagaatgtcgaatttaatagcgacggcgcgctgggtattacggtgtatcaccagaaccgcaaaggcagcgcctcttcgacagatttaagcccgcaggcgattgcccgtaccgtgcaggccgcgctggatatcgcgcgttacacgtcgccggacccgtgcgcaggcgtggcggacaaagaactgctggcgtttgacgcgccggatctggacttgttccacccggcagaggttacgccagacgaagccattgaactggccgctcgtgcggaacaggcttctctaaaggcggataaacgcatcaccaataccgaaggcggtagttttaacagccattacggcattaaagtgttcggcaacagccacggtatgttgcagggatattgctccacgcgccattcgctctcaagctgcgtcatcgccgaagagaacggcgatatggagcgtgattacgcttacaccatcggccgggcaatggcggatctgcaagcgccggaatgggtcggggccgagtgcgcgcgccgtaccttatcccgcctgtcgccgcgcaagctctccactatgaaagcgccggtcattttcgccaatgaagtggcgacagggctatttggtcatctggtcggggcgattgccggcggcgcggtataccgtaaatccacttttctgctcgactcgctgggcaaacaaattctgcctgaatggttaaccatcgaagaacacccgcatctgctaaaagggctggcgtcttcaccgttcgacagcgaaggcgtgcgtacggagcgccgggacattgtgaaggatggcgtactgacgcaatggttgctgaccaactattccgcccgcaaactggggctgaaaagtaccggtcatgccggcggcattcataactggcgtatcgccgggcaggggctgaactttgagcagttgctaaaagagatgggcaccggcctggtggtgacggaactgatgggccagggcgtcagcggtattaccggcgactactcccgcggcgctgcgggattctgggttgaaaatggtgaaatccagtacccggtaagtgaaattaccattgccggtaatttaaaagagatgtggcgtaatattgtcaccgtaggtgatgatattgaaacgcgtagtaatatacagtgtggttcggtattgttaccggagatgaaaatcgccggacaataatacccgtcatacttcaggctgcaggcgcgttggctgcctgcaacccgaattattcagggtattacacttatcgttaataataaaaaaggaagtgagcaatgcgtaaaagcctgttagctattcttgctgtgtcatcgctggtattcggttcggctgtttttgctgccgatcttgaagataatatggatattctcaatgataacctgaaagttgttgagaaaacggatagtgcccctgaactgaaagcggcattaaccaaaatgcgcgcggccgcgctggatgctcaaaaagctacgccgccaaagctggaagataaagcgccggatagcccggaaatgaaggattttcgtcacggttttgacattctggtcggccaaattgatggcgcgctgaagctggcgaacgaaggtaacgttaaagaagcgaaagcggcggcggaagcgctaaaaaccacccgcaatacatatcataagaagtatcgttaatttttgtgggatggcggcttcgctttatccgcaggtcgccatccggcaaactgtaatacccatcacactttctcactttatacgacaacgtcattgttttgccatttcctctttatgccgcgatagatctcacactttcccggcgataattcattaatgccgccttttctgtggcgcagatcacctatcccactcgcgtttccacttcgaggtggaaaataactcgctacaaacttttaacccttaccgctagttttatctcattgccattaacggggtgagacgcgtggataacggagcagtaaaacacgatgccggtgagcgaattaacgaactggctgaacaggtgttaacgcaggtggatggcctgctggggcggcatcacattgtccccaatgcggtacagacgcaaatgctgacctcgcacgttcgcgcgatggcgcaccggtcaattaccggcgagcctttaccggaagtcgatgccagcttgtttgatgaaatctcagccgaatcaatggcgctcgcccgcgaaatcgtggcggcgtttggcaaccttcctgacgaagaagcctggctattatcggtacattttgaagtcgcgaaagacaacctctaaggagcaaaaaatggaacagattaccgtcgtgattggcgatcgcctgggtaaaggccagaaagtggcggcaggcgtggaaaaagcgggcggtcgcgcggtcgtcgtgccgggcgtcgcggcagacatgaagctgggcgatgtgatgaaagcggaaaacgccaccttcggcatttcattttgcggcagcggcggcgcgggcgctatcaccgcgcaaaacaagcatggctacaaagccaaatatgggatgcggtcagtagatgaaggcgtcaccgctatcaatgagggctgcaacgtgttgggtttcggctttatggataaagaagagctcggcgagcgcctggtgcaggcgtggcaaaagaaatacggcgcctgatgatgaaagagcaattcaccaccacggtgagagtaaaaggcaagggcgacgccaaagcacgcgcctttgccgatgcgctgaaccatgttcagtcggcggtgatgagagagtcgccgtatatcttactgcgtattgagccacaggatgtgcggattgttcaggcgcatgagtcggtgcgtaaagaggcctttctgtttttctttttgcgccgggaacgacgcacttacagcgtggagctggatgtgaccgtcaacgtgaccgccatcaatctcgacagggtggatttcgtcgcgaaacgctgatttttattaaaaaggcatagttatgttcctgataatactaattaaatcgctcattatcggcgcgctggtcggcgtaggggtgggcgctggggctgcacgcatgtttcacgcgccaaccacgcaggggatgggcgcgttccgtacgttgggcgaactcaactcttgtgaaggcgacccggcatctcacttctcctttgggctgggtttcttctttaacgcctgggcctcgtctgtggcggccggatcgttcacccaggatgtcgatcaccgcatcatccctaactggggcgcggcggcgctaatgatcaaaaaccgtaacgtcggcgagacgctgcacgacccgaaaaaaatggcgatcgcctgcgccgtcatcggcatgatagtcgtgacgttccttaacctgaccgcctcatccgtgccagaagcgctacaggtgacggcggttaaggtgctggtaccggcggcaaacctgctggtcaacatcgtcatgcctgtgatcttctggttagcagcgatcgacgccggtaaaaaatcgggcttctgggccaccgttttcggcggcgcggcgcagctcatcatggggaacgccgtaccggggctggtactgggtattttgatcggtaaaggcgtagaagagagcggctggaaccatgttaccaaagtgatgatggtcgccatcgttttgctgtttgtgttgagcggcttcttccgcggcttcgacatgaaaatgatcgagtctttcaacatgacggtaccgaactggcttgaactgatccacaactcgctcagcggcaaataacggaggccacaatggaagagaataaaggtttttggtatgccgactggtcgttcccgatctttgttggcctgctctcctccggcgttttcgccgggacgcatatgtactatctgtacggcatcggcgcatttaacgaagtcgcttttgtggcgatgttgaaagcggggatggataccggcgtctacggcgcggtcgccgctttcggcgccagctttttatttgcccgcattatcgaaggttcgctggtcggaattctggatatcggcggggcaattcagaccggcgtgggcttaggggttccggcgttactgctgggggctggctttgtcttcccggtggcgaactttatcgcttcgctgataaccggtctggtgattggtctggcgattggctacatcattattctggcgcgtaagttcaccattaatcagagcgactccacgtacggggcggacgtcatgatgggggccggtaacacttcaggccgttttctggggccgttgattatcctcagcgccatgacggcatcgattcctattggtctgggctctctggtgggcgcgctgctgttttatatctggcagaagccgattactggcggcgcgattttaggcgcgatgatcctcggttccatcttcccggttgcgattagctaactgttgatttgtaggccggataaggcggttgcgccgccatccggcaaaggagagaacgatgtttgatttactcctgcgccatgcgcgtctggtcgatgacacgttgactaatattgccctgcaagatggcaaaatcgcggcgttgggtgacgttgatggtccggcgttgaaaaccattgacctgcgcggtgagtgttttgtcagcgcgggttggattgattctcacgttcactgctacccgacatcgccgatttaccacgacgaaccggacagcgtgggtattgccactggcgttaccacagtggtggatgcaggcagcactggcgcagatgatattgacgatttttacaccctgacccgtgacgcgaccaccgacgtttatgcgctgctgaatgtttcacgcgtcggacttattgcccaaaacgagctggctaacatggccaatattgacgctgatgcggttcggcaggcggtaaaacgccatccggattttatcgtcggcctcaaggcgcggatgagcagcagcgtggtaggcgttaacggcatcacgccgctggaacgcgctaaagccatgcagcaagaaaacggcaacctgccgctgatggtacatattggcaataacccgccggatctggacgaaatcgcggagcgtctgacggcgggcgatatcattacccactgttacaacggtaagccgaaccgtattcttcggcctgacggcgagctgcgcgcctcggtgacacgagcgctggcgcgcggcgtgcgtctggatgtcgggcatggtaccgccagcctgagctttgcggtggctaaacgcgctattagcctggggattttaccgcataccatcagttccgatatctactgccgtaaccgcatcaacggcccggtacattcgctggctaatgtgatgtcgaaattcctcgccatcggcatgtcgctgccgcaggtcattgcgtgcgtgacggccaatgccgccgatagcctgaatctgaaaaccaaaggtcgtcttcagcctggtctggatgccgacctgaccctctttacgcttaaacgccagcccaccgtgttggtagacgcggaaaacgacagcttacaggctgaagaattgctgacgccgcttgccgcgatacgcgcaggcaagggctatatgaccgaacaagggagcgcggaacatgccttcgatttttgagaagtatcaattaaaacaggtgattaacgcctccggacgtatgacggcgctcggcgtctctacgccgcgcccggaagtgatagacgcggcgatggccggaatgaatcagtatttcgagatgaaagatctggtgaataaaaccggtgagtacattgcgaaattgctggaggtggaaggggcgacggtagtctcctgcgccagtgcgggccttgcccagtcggttgccgcggtactggttcaggacagcgactggctgctggaaaatctgcacgttacaccgattgaaaataacgaaatcgtcctgccaaagggccacaacgtcaactttggcgcgccggtgggaacgatggtggcgctgggcggcggcaaactggtggaagccggttacgccaacgaatgttccgccgcgcagttggcggcggccattacgccgcgcacggcggctattctctatatcaaatctcaccactgcgtacagaaaagtatgctcagcgtggagcaggctgcggtggtggcgcgcacgcataatctcccgctgattgtggacgcggcggcggaggaagatttgcagtgctactaccgcgtgggcgcagatctcgttgtctatagcggcgcgaaagcgattgaagggccgaccagcgggctggtgattggcaaaacgcagtatgttgagtgggtaaaacgtcagtcagcgggcattggccgggcgatgaaggtcggcaaagaaggaattgttggcctgacctgcgccattgaattgtacctgcgggcgcaaaaagagagcggcgcggagatggtagaaaaaatggcgccctttatcgacacgttgaacacgtttaacggcgtcagcgcccgcgtagtgtgggacagcgccggacgcgatatcgcgcgcacggaaattaagtttgatgaagccgttaccggcatcgccacaggcgaactggtcgacgcgctgaagcaaggggaatacgcgatttactttcgcggatacaaagccaacgaagggattattgaagcggatgtccgcagtgtcgatcgcgcgcagttagcgattgtggcgcgtcgtattggcgaggtgattaatcaggagaaacaagcatgaaactgacccctaacttttaccgcgatcgcgtttgcctgaacgtactggccggttcgaaagataacgcccgggaaatctacgcggcggcggaaggtcatgtgctggttggcgtgctctccaaaaactatccggatgtggcaagcgcagtcgcggatatgcgtgaatatgcggcgcttatcgataatgcgctctccgtcggactgggggcaggcgatcctaaccagtcggcgatggtgagcgaaatctcgcgtcaggtacagccgcagcatgtcaaccaggtgtttaccggcgtaggaaccagccgggcgctgctggggcaaaatgagacggtggtgaacggtcttgtctcgccgaccggcacgccggggctggtgaaaatttccaccggcccgctaagcagccgcgcgccggacggcatcgtacccatagaaacggcgattgcgctactcaaagacatgggcggcagctctgttaaatactttccgatgggaggactcacctgtcgcgacgagtataaagcggtagctgaggcctgcgcccgccatgatttctggctggaaccgacgggcggtatcgatctggaaaacttcgccgagattctgcacatcgcccttgatgcaggtgtaagcaaaatcattcctcacatttatagttcgattattgataaggtgagcggcaacacccgtgcggacgatgtgcgtcagttactcgctatcgtccggtcgcgtgtcggctaatcatgaggagagagacgtgcgattccccaaccaacgtttagcgcagctatttgcgatgctgcaaaacgagacgctgccgcaggacgagctggcgcagcggttgtcggtctccacgcgtaccgttcgggcggatatcgccgcgctgaacatgttgctgacgccgcatggcgcgcaatttactctcagccgcggcaacgggtatcagctcaaaattgatgatccggcacgttatcaatccctgcaaacgcagcaatctcccgccctggcgcgcggtccgcgcaccagccaggagcggatacactatttgctggcgcgttttttaacctccgccttctcgctgaagctggaggatttagcagatgaatggtttgtcagccgtgcgacgttgcagaacgacatggcggacgtgcgcgagcatttgctgcgttatcatctgacgctggaaacgcgtccgcgtcatggcatgaaattgtttggcggagagatggcgattcgcgcctgtctgaccgaccttttatggacgctggcgcagcaggagccctctcatccgttaattgttagtaccacgctgaacaccgaggtgtctcaacggctgcggtctcttttgccggatattttctctcattgtcaaatccgcctgaccgatgagggcgagctgtttctgcgtttatactgcgcggtggcggtacggcgtattcgcgaggggtatccgttatcggaatgcgtggcagaggaggtcgatgaaaaggtgcgccatgcggcgcatgagattgcggagctactacaacagctggctgacaagccgctgtcggagccggaagtaagctggctgaaggtgcatattgccgcccgccaggtacaggagattgcccccagcgccattaatgccgatgatgaagaggcgctggtgcactatatcctcaattttattaatacccagtacaactataacctgttgaatgataaacagcttcacgcggacttgctgacccacatcaaaacgatgatcacccgcgtgcgctaccagatcatgatccccaacccactactggaaaatattaagcagcactatccgatggcgtgggatatgacgttggcggcgatatcgagttggggaaaatacacgccgtataccattagcgaaaacgaaatcggttttctggtgctgcatattggcgttgggctggaacgtagttacaacattggctaccagcggcagccgcaggtactgctggtgtgcgatgctggtaatgcgatggtgcggatgattgaagcggtactggcgcggaaatacccgcagattgagattgccctcactctgacactacgcgactatgaggcgcgggacagtattgtggaggattttgtgatttccacggcgcggatcggcgaaaaagataagccggtcatcatgatcgccccctttcctaccgactatcaattggagcagatcggtaagctggtgctggtggacagaacccgtccgtggatgctggataaatatttcgatgcctcgcattttcgcatcgtggagggggaaatagatcaacagacgctgtttaaaacgctgtgcgatcagttgcacgaggaaggctttgttgatgcggcgtttctcgattcggttattgaacgtgaagctatcgtcagtacgttattaggcgacgggattgccttgccgcacgcgctggggctgctggcgaagaaaacggtggtttatacggtgctcgcgccgcaggggattgcctggggtgacgaaacggcgcacgttatttttttactcgccatcagcaaaagtgagtatgaagaggcgatggccatctacgatattttcgtcactttcctgcgcgaacgcgccatgacgcgcctatgcgcatgtcagaattttacgcaatttaaaacggtcgcgatggagtgcgtgagtcgtttttgagaggcgttatccagaattcgatgtaatgcgaatgtaatgctaaactgcattacacattcgattctactggaggcataatggccacgctgaacgtccgtctggatgacaaactcaaaaatgaggcttatgccgtgctggaaaaactgaacattactccaacggaagccgtgcgattactgttccagtacgtcgcggaaacggggcgcatgccagtgaaaaccgtcactcttagcgacagtgaagatgcattgattcagacagttcgggagaggctgtctagtccgcaaaagggaatcaaggttagtctggatgacttatgaactggaattcgacccgagggccttaaaagagtggcataagctgggcgatacggtgaaggctcagcttaagaaaaagttggctgatgtgctattgaaccccagaatcgactctgcccgtttaaacggtcttcctgactgctataaaattaagcttaaatcgtccggttatcgtctggtgtaccaggttcgggatgacgttgtgattgtgtttgttgttgcggtcggcaagcgagaacattcagccgtctatcacgatgcaaacaaacggctttagcgatcaacgcaaatgatgcactacctggttgctgctaccgcgccagataagcgccgggtctttcagatcctgcacaaatttgccatcgaccagcacgttgatgagatcgactacctgcatctgtgcggcgttgagttcatcgagcttgtagccggtccacacccagatatctttccccgggcactccgcgtggatgcgttgtaccagtgccaggatatccggtacgttttgcggatgcagcggatcgccgcccgacagcgagatcccctgacggtgaatgcgcgtgtcgttcagatcggcaatgatcttatcttccatctctttggtaaacggctggccggagttcagccgccaggtgcttttgttatagcagccagggcattcatgcacgcaccctgacacaaacagggtgcagcgggtgccggggccgttaacgatgtctacggggtagtattggtggtagcgcatagcgggtgtccagaaagcatgtaggccggataaggtgcttgcaccgcatccggcaacattgtgatgcctgatgacgacgcgattgcgtcttatcaggcctacggtctttgcaaacggaaattaacctatctgcccattgcctaaatgcttcacgcggcgcttcacttcttcctgcttaccggcgttaaacggacgcgcgtccgggctgcctaaataaccgcacacgcggcgggtgaccgagacgcgcgcggcgtcgtggttgccgcatttcgggcaggtgaaacctttactggtacattcgaactccccggtaaagccgcactcgtagcattcatcgatcggcgtgttggtgccgtaatacggtacatgctgatagctgtaatcccagacatcttccagcgctttcaggttgtgctgaatgttcgggtattcgccgtagcaaatgaaacccccgttcgccagcggcggatacggcgcttcgaaatcgattttgtcgtacgggttgaccttcttctccacgtcgaggtggaagctgttggtgtagtaacctttatcggttacgcccggcaccacgccgaactcggcggtatccagacggcagaagcggtcacagaggttttcacttggcgtgctgtacaggctaaagccgtagccggtctcgtctttccactgatccacggcctggcgcagacgctccacaatcgcgatgcctttagcgcgaagttgctcgctgtcgtacaggtgttcgccgccgaacagcgcgttaatggtttcatggataccaatgtagcccagagagatggacgcacgaccatttttaaagatttcagacacgtcgtcgtccgctttcagccgcacgccgcaggcgccttccatatacaggataggcgcgacgcgggctttcacgccttcaaggcgggcgatacgggtcatcagcgccttccgcgccagcgccagacgttcatccagcagtttccagaatgcggtttcgtcgccttttgcttccagcgcgatgcgcggcaggttaaggctaatcacgcccaggttgttacgcccgtcgtggatctgctcgccgttttcgttctcccacacgccgaggaagctgcggcagcccattggcgttttgaacgaaccggtgactttgaccacctgatcgtagttgaggatgtccggatacatgcgcttgctcgcgcactccagcgccagttgtttaatgtcgtagttcggatcgccaaacttgtggttcaaaccatcgcggatagcgaagaccagtttcgggaacacggcggttttgcgatttttacccagaccggcgatacggttacgcaaaatagacgcctggatcagacgcgactcccaactggtgccgaggccaaaaccaaaggtaacgaaaggcgtctggccgttagcggtgtgcagcgtgttaacttcgtattccagcgactggaaggcgtcgtagcactctttttcggtgcgagaacgcgcatacccttcggcatccgggatctgccactcatcggcggttttgcggtgcttgttgtagctttcggtgacaaacggcgccagcacttcgtcgatacggttaatggtggtgccgccataaatatggctggcgacctgcgcgataatctgcgcggtaacggcagtggcggtagagattgatttcggcggttcgatctcggcgttacccatcttaaagccctgggtcaacatgcctttcaggtcgatcaacatacagttgaacatcgggaagaacggcgaatagtcgagatcgtgatagtggatatcgccgcgctcatgcgcttgtactacgtcacgcggcaacaggtgctggcgggcatagtgtttggcgacaatcccggccagcaaatcgcgctgggtgggaatgactttactgtctttgttggcgttttcattgagcaacgcggagttagtttgctctaccaggccgcgaatttcctggttcagacgaccacgcttttcacgctgaatgtcgcgatcgtgacggtattcgatgtaggcgcgggcaagctgtttgtacgggccggacatcagttggttttcaaccgcagtttggatctcgttaatatccacctgactgcgcgcgttcatttggctgctaacgacttctgcgacggtggcacagtaatctgcgtcatcgactcccgctgctttagctgcacgtagaatggcttccttaatgcgctctgatttgaatggcactttacagccatctcgtttcatcacatgcggtgtcatgatcactccatatttgtaagaacaggttatccacagaggccggggaagccataacaggtttattcatctcttttccaacgacttcccgcaatcctgacccaggttatccacaattcaccttgtgtcgagtgaacaggtgttgtagcaattgtagtcaattaatacaacatattgggtcggtgtgcattttaaagtctatatgtagtgatttgcatcaaggatgtttgcaattttattgatgtagaacaaggtaaaaatcagagcgtacagatggcgggcgctgtagcgtttgtaaaagatagcaagaaaaatctgattaattattcaacaaaaacagtcagtaacctggagcaacgccacagcccgtgtcaataggtttgtggcgtttatccgtataaggatgtcgcgttagcgttgtaaccaccagatggcttcaaatgggcggagcgtcatcgcggctggctggctggcgacctcgccataattatgcagtagcgcctgccactgtcctttgatatgcggcggatgccactcctggcactggttactcagattggcgacaaccagcaggatttgcccctgccactggcggcgataacaccatactgatgggctatccgggaggagatcctgataatcgccccagatcagtacaggctgggttttacgtagcgcaatcagcttttgataggtgtaaaacaccgagttttcatcgcgtaatgccgcctcgacgttaacctccgtatagttatcgcacaggcttatccacggctcgccttgggtgaaaccggcgtttttaccgttgtcccattgcatcggcgtgcggctgttgtcgcgggatttactggccagaatagccagcagttcgtcggggtcgcgcccggcggcgcgtagcgcggcaaacatgttatggctttccacgtcgcgataatcggtgatgcgggtaaagtgtgggttggtcatgccgatttcttcgccctgatagatataaggcgtcccttgcataccgtgcagcgccatcgccaacattttcgcggctggaacccggtattcaccctcgtcgccaaagcgggaaacgatgcgcggctgatcgtgattacaccagaataacgcgttccaggcgacgttatgcatcccctgttgccagtggcggaacaacgctttcagcgccacataatcaggttttgccagcgtccacttttcgccattggggtaatccaccttcagatgatgaaaattgaaggtcatcgagagttcgtcgccgctaagcgcggcatattgctggcagttttccagcgtggtagaggacatttcgcctaccgtcatcagattacgcggcgtaaaaacgtcacggttcatttcgcgtaaaaacgtatgcgcgcgcggcccgtcggtataaaagcggcgtccgtcgcccgtcggatcgtcaggaaaattctgatctttggcgatcaggttcaccacgtccagacgcaggccatccacgccgcgatcggcccagaattcgcagacctttttcagctcggcgcgtacggcggggttttcccagttcaggtcggcctgttcaggcgcgaaaaggtgtaaataatattgttcgctctggctatgccagcgccaggcgctgccgccaaatttggattgccagttattcgggcagacatccggcgtgccatcgcgccagatataaaactgacggtatggactctctttgttcagcgcttcgcgaaaccaggcgtgctgggtagaagtatggttaaacaccatatccaggatgatacgaataccgcgtgctttcgcctgcgcgaccagctcgtcaaaatcatccagcgtgccgtaggtcgggtcgatagccgtataatttgcgacgtcataaccgttatccacctgcggcgagatataaaacggcgtgagccagatggcgtccacgccgagtcgctgtagatagtcaaggcgctgcgtgacgccgcgtaaatcgccggtgccgctgccggtcgtgtcctgaaaactttttgggtagatctgataaataacgccgttttgccaccagaggggaatagtcattgttgtttcctgcaagtgcgttgggacgcaactgcgccccggagaagtattagacaatttgtaatgtgccctgacgatgcttacgctgatagataaaggtggtcagaatcaccgggatcacgatcgcgataaccatcgccatgccgtacacctgccagtagcgcggcggtatagacaggatgcccggcaggccgcccacgccgataccgttggcgatgacgccgttcagaccgcagagcagtcccgccagaccagatccgatcatcgcgcacagcatcggaaaacgatacttcaggttgataccgtacatcgccggttcagttaccccaaggtaagcggaaatggcggcaggaacggagatctcgcgttcattgtgtttacggctggagatgatgatgcccaccacggcggaggcctgcgcgatattcgacagcgcaatcagcggccagactggcgtaccgcccatgctctggatcatctgcatatcgatagcgagcgttgtctggtggacaccggtaatgaccagcggggcatacaggaagccgaacagcgccgcgcctatcggggcgaaactgccggtcatcagataacgtaccgcaaaggccacgccgtcgccgatcatacgaccaaaggggccgataaaggtgtgggcgagaaagacggccagtattaacgaacacaccgggacgacgaccaggtagagataatccggcacgatgcgtttcaaccgcgtttcaataaatccaagcgccagccctgccagtagcgccgggataacctgcgcctggtagcccactttctcaatgctaaataagccgaagttccagacgtccggcgtttgctggcccagcagatacgcattcatcaactgcggcgacaccagcgtcacgccgagcacgataccaagaatcggcgtgccgcccattttttcaccgccgaccagcagattcccaccggcagatagaaaaagatcgcttcgccgatcaaccataaaaaatcataaagcgtttttagcgccggatgcatctgcgccagcgtttggccgttgctcatcggcacatcgccgatcacgttacgaaagcctaagatcaaaccgccgctgatcaacgccggtagtagcggaaagaagatctccgcaaagtgggaaattaactgctcatgccatttcatgttctggcgagcggcttttttggcctgctctttatcagcatacgctttgccggtggtctccagcagcgcgttatagtaatcgccaacgtcggtgccaatcaccacctgaaactgaccagcgttggtgaaacaacctttaaccatcggtaattgttcgatctcttttggcctggcgttcgcgggctggtggagcacaaagcgcaggcgagtaatgcagtggctcaccgtggcgatgttgtcgcgcccgccgaccaggtcaatcagccggtcgatatcggcttgttttactttgctcatcgtaaagcctcatggcagaggagatatgttatgggttggcgcaagagtagctcttcaacgttggtttaaaaatgggaacgttcccgaaacgcagcgacgatcacaaattactcgtggtattccgtttaattagtcactcaggcgagggtagaaggaatgacgatccggcgcggatcgcagcggccattgatctgttcgatcagctgcgaagccgcctgtcgtccggcttcagcatagccaggatcgacagtgacgatctccgggtgcaggaattttatcagcggcgtgttcccgacgcttgccagttgcagcgtctcaatacgttgctcctgtaaatacttactggcgcccaacgccagcgtatcggtggcgcagactaacgcggtggtatccggcatgatgacgcttgccgtatgctcatagccctgcttcatggcaagaccgggcagggcggcgacggggtgaagtttatgttttttgcaaaacgccaggtatgcgtcatgccgacgtttgccggtggtaatatcgctatggggaacgcccagaaagctaatgttgcggtgtccctgctcatacagccgctgcataaggatatgaatcgcgccctcgtcgtcgtaacagacggaggcaaaaccttgcgcatctcttgccagcagcaccagcgaggctttccagggggcgatcaactcttctgtgatgccggtaaagccaaacagcaccacgccatcaatgttacgtcgtctgagcatgcccagatgttccattaccagcgtcggcgagaactgactttccatcataatagggtcgtagccctgttcgtaaaacgcaggcagcatggtctgaaccgcgaggttttcagacaacgaatcaaggcgagtgacgataatagcgaccactttatcgctttgtccccgcatcgcgcgggcggagcgggacggggagaaaccgtgttgattcatcaccgcttcgacacgctcgcgggtacgttcgcttacgccgctttcattgttaagcacgcgggaaacggttgatttccctacgccgctcaggcgggcgatgtctttgatagtgagccggttttgcatcctgttttcccgtggcgtgacgctgatggtgataaaaagagtaactttactcaagcgaagggcaatgggcaaagtctggtttatcgttggtttaattacgtaacggtatgataccgccataattgccacaaaacttatggatttatgcgtataatccgcggcgcaaattatttacttaccggaggcgacatggaccctgaacccacccctctcccgcgatggagaattttccttttccggtaagcctgcctctgctgtcttaccggtgtgtaagacagtgacacaataacgtccctgtttttatttaaacattgctcatcgggcaaggctttgccgtgcctgaagaattttctgcgcctgacttcggcgcggagggattacctatgctaaaaatcattacccgccagctttttgcccggcttaatcgtcatttgccttatcgtctggttcaccgcgatccgctgcccggcgcgcagaccgcggtaaatgcgactatcccgccttcgctgagcgagcgctgtctgaaagtcgcggcaatggagcaggagactctctggcgcgtttttgatacgcacccggagggattaaacgctgccgaggtgacgcgcgcgcgtgaaaagcatggcgaaaaccgccttccggcacagaaaccctcgccgtggtgggtgcatctgtgggtatgttatcgcaatcctttcaacatcttactcacgattcttggcggcatttcttatgccacggaggatctgtttgccgcaggcgttatcgccctgatggtcggtatctcaacgctgctgaattttgtgcaggaagcgcgctcgacaaaagcggcggacgcgctaaaagcgatggtgagcaataccgctaccgtactgcgggttattaatgaaaatggcgaaaatgcctggctggaattacccatcgatcaactggtgcccggcgatattattaagctggcggcgggggatatgatcccggcggatttacggattatccaggcgcgcgatctgtttgtcgcccaggcgtcgctgaccggcgaatctctgccagtcgagaaagtcgccgcgacgcgtgagccccggcaaaataacccgcttgagtgcgacacgctgtgctttatggggacgaacgtcgtgagcggaacggcgcaggccgtggtgatggcgaccggcgccggcacctggtttggtcaattggcggggcgcgtgtcggaacaagataacgagcagaacgctttccagaaaggaattagccgcgtcagtatgttgctgatccgctttatgctggtcatggcgccggtagtactgattattaatggttacacgaaaggtgactggtgggaagcggcgctatttgcgctctcggtcgcggtagggctcaccccggaaatgttgccgatgatcgtcacctccaccctcgcgcgcggggcggtgaagctctcgaaacagaaagttatcgtgaagcaccttgatgcgattcagaacttcggcgcgatggatattctgtgcactgataaaaccggcactctgacgcaggataaaattgtgctggagaatcacacggatatttctggtaagcccagcgagcatgtactgcattgcgcctggctgaacagccattatcagaccggtctaaaaaatttactggatacggcggtcctggagggagtagacgaaaccgccgcgcgtcagctctccggacgctggcagaaaatcgatgagatcccgtttgattttgagcgtcgccggatgtcggtagtggtcgccgaagattcgaacgtgcatcaactggtctgcaaaggcgcgttacaggagatcctgaacgtgtgtactcaggtgcgccacaacggcgatattgtgccgctggacgacaatatgctgcgccgggtgaaacgcgttaccgacacgctgaaccgtcaggggctacgcgtggtcgccgtcgcgaccaaatacctgcctgcgcgtgagggcgattaccaacgtatcgatgagtctgacctcattctggaagggtatatcgcttttctcgatccgccgaaagagaccaccgcgccggcgctgaaagcgctgaaggcgagcggaattacggtgaaaattctcaccggcgacagcgagctggtagcggcgaaagtttgccatgaggttgggctggatgcgggcgatgtcattattggcagtgatattgaagggttaagcgacgacgcgctggcggcgctggccgcccgtacgacgttgtttgcgcgtctgacgccgatgcataaagagcgcatcgtcactttactcaaacgcgaggggcatgtggtcggttttatgggcgacgggattaacgatgctccggcgttgcgggcggcggatattggtatctcggtagatggcgcggtggacatcgcccgtgaagcggccgatattatcctgctggaaaagagcctgatggtgctggaagaaggcgtcattgaaggtcgtcgtactttttctaatatgttgaaatatatcaagatgacggccagctcaaatttcggtaacgtgtttagcgtactggtggcgagcgcctttttgccgttcctgccaatgctgccgctgcacttgctgattcaaaacctactgtacgatgtatcccaggtggcgattccgtttgataatgtcgatgaagaacaaattcaaaagccgcagcgctggaatccggcggatttggggcgctttatggtctttttcggtccgatcagctcgattttcgacattttgaccttttgtctgatgtggtgggtatttcatgcgaatacgccagaaacgcaaactttgttccagtccggctggtttgtggtgggattactgtcgcaaacgctgattgtgcatatgatccgtacccgccgtctgccgtttattcaaagtcgcgccgcttggccgctgatggcgatgacattgttggtgatggtggtgggagtctcgttgccgttttcgccgctggcgtcttacctgcagttgcaggcgctgccgttaagctatttcccgtggctgattgccattctggtgggatatatgacgttaacccagttggtgaaagggttttacagcagacgttatggctggcagtaaacactttcgtcggggattcgccagcgtgcttaatccccgatatcgctaaccaggccagatgcccgtaaagctcgacaagtttaacgcgatcggctttatctttaaatttcagggcttattcaagcaactgtagaatgctatatgcaggcataaaaaagaggaatgtccagctaagtttgtaaaatacattctctgcccccgagccagaacgagaggaggagatgtcccaccgccggatatgttttgcggatatgcgacgaaagcggcgaatatagctaatgcaataaactaagtaaggaggaatcgctaaggcggcagtgggtttaggaaacataagggtaagcaatatggctgcgacaatgaagcataaaaagactatcttcgcggtagattctatctgttttaattcctggcgtatgctttcagcatgtttctcctgccagcgacggagcgtgctgttgctaaatccatattcttcgcacaacgccttattcggtacgccgtttttcgactgttgcagaaaatcggcgatttgttcctcggtaaaacgcgatcttaccattgccgcctctccatggctgttggtgccccgaaccgggcaaacttgcgccgcccggcggggatgacgtccggcgcttagcgacgaacagcgatcgcttcaatctcaattttcacgtctttcggcagacgggcaacttccacgcaggaacgcgccgggaaggtggcgttgtgctcggtgaagaaggcttcgtaggtggcgttgacggtcgcgaaatcgttcaggtctttcacgaatacggtcgttttcacaatgtcgcctactttcaggccagcggcttccacgatagctttaacgttttccagcgactgacgtgcctgagcggatacgtcttccgctacggcaccggttttcggatcgaccgggatctgaccggaagtgattaccatgctacccaggtcaacgccctgtacgtatgggccgattgctgctggtgcattttccgtcgcaatagttttgctcatgatttctcctgaattacagcggtaatagaatgtccccgctcattatagggagccgggatctcataaccaacccaaattagttggccagcaccacataatgcgaaaactctttttcacagtatttgcatttgagggcgatatcattggcgcgttttttcactgcaaagctggaggatactggttccgcgtggctgatgcagttgctgttcgggcaaaccagcacattattaatacgctctggcaggctggggcgtgatttcccgactacgtcgtagttgtcgatgcggttaacggtggcctgcggcgcgtacagagcaagttggttaacctgctcttcggtgagaaaggtgttttctattttgattaagtctttacgccccatctcgccagacgggagattcagaccgatagtgattcgctgatcggtctcggtcaatttaaacagactcagcagtttaaagcctacctgcgcagggatatggtcaatcacggtgccgcatttaatggcttcaacctgcagtttgttatcgtgtgtcatcgtttttctcccttacagactcagttcgctattcagtactaacgccagtaacgcctggcgagcgaaaataccgttgcccgcctgttggaagtaccaggcgtgtggcgttttatccacatccgtggtgatttcatcaatccgcggcagcgggtgcagcactttcatattttcacgcgcgccgttcaggtcgctggcgcgcagaacaaactgcgccttcacattggcgtactccgacgggtcgagacgctctttctgtacgcgagtcatatagaggatgtcgacgtcggccatgacctcttcaatagaaccatgcaggctccaggccatccctttttcatccagcatatccagaatgtactgcggcatcgccagcgcgtccggcgcgataaaataaaaacggttgccgctaaatttcgccagcgcctgggttagcgaatgcacggtgcggccatatttcagatcgccgaccatcgcgatatgcaagttatccagacggccctgcgtttcctggatggtgaacagatccaacagggtctgtgtcggatgctggttcgaaccgtcgcccgcattgagcaccggcacctgaccggaaaactccgtcgccagacgtgccgcgccttcttgcggatggcgcatcacaatcgcgtccacgtaagtgctaatcactgagatcgtgtcggctaacgtttctccttttttccccagcgacgtgttggcgctgtcggagaagcccactacgctggcgcccaggcgatgcattgaagtttcaaacgacaggcgggtacgcgtggaggcttcgaaaaagcagctggcgatcactttatgtttcaaaagctccggctgcgggttggcttttaatttcgccgccgtcgccagtaccagattaagatcgtcgcggctgaggtcgtttatggaaatgatatgtttttgatatagcgggttagccatgtttatctcctgacgcctgggcaaaaaaaaacccctcaattgaggggcttggtattggttttcaacggaaagaaaaacggcaggcctgcgtcttttttcagacgcggtaagacagaatgtcgtacacactgaaccatgcttcctcccggcaaattgtccgcgattatactcagctctgttttgggatcaagcgattaatgcatgatttactcatcgcaaacggttcttatgaatttaaattcattttaagcaaataattaatttgtttgtgtaccagcgccgtgcgctgaacgacccgtggtgcgacccagacaatactgctaccggcaacgacgccgagaatttccggcaatgcgtggtaatccagaattctcgcgacggcgcgaccataacctgccgccgtatggataaggataaattcgctattatgttcaacgctaacgaccatttcggctattgaacgtccggcatccggcgaaggtcgccgctggggatttacggaataaatcttttgtcccttcgtatttctgatttttattgcgcccagcagcttgagcaggcgcgaaaccgtagactggctgataccttcaaatccctcattttgtaaatcgcggcgaatctcctcctgggacaggtaacttttttcactaatcaggcgctgacaaaccgccagttgctgttgttctttggcggagtaatcatcgtattccttcataaatgcaccttatctttattattgatatcaacggactggcgaaattcatcacatttgtcacatcgattgcggatcaatcgggcggttttgcaggaaaatgagaagccgatcaaaaaaggtgacggcgtgcctgatggcgctgtgcttatcagtcctgtcagataagacgcgtcgccatctggctcgttacatcatcgctccgatgctcagtaccgccatattcagcaatgtcaggatcagcaacagcggggcgacccatttcagatagcggacatagggaacccgcgcgatcgccagaccgcccatgaccacggcggaggtgggcgtaaccaggttcacaatcccggaggccgactggtaggcggttacgaccaaatcccgctgtacgtgggcaaaatccgctaacggcgccataatgggcattgtcaatacggcaagaccggaagaggagggcaccaggaaggagagcaatacttccagccagtaggttacgtttatgaaaatagtggtagagaggccggaaaccagactttccgcgctgtgcaaaatggtgtgggtaatcataccgttatccatgaccaccacaatgccgcgcgcgataccaataattagcgccacgccgagtaaatcccgcgcgccgtcaataaaggtactggtgaacgcttcctcacccatccgcgttatcacgccaacgataatcgccgccgccagaaagacgccggagatttccgccatccaccagccgagaaccgccacgccgtaaatcatcaccgcgaaagaggcggcgaagatcatcagcacccatttccgggtagccgtaaactccagcagagtattggctcgattgccgaggaaatgggcgcggttttcctccattttatctgccacgatagaaagctcaggatgggcgcggactttgcgcgcatagcgcattacccaaaacacgcacagtacgtagccgacaattaacagcagtactcgcatcagcattccctgagtaaaagggatgccggcggcgttggcggcaatgaccgtggcgaaagggttaatggtcgaaccgagcgtgcctatccccgcgccgagcagtacggttgccgcggccactaacggatcgaagcgggccgccatcataaccggcaccagcagcgtgtagaagggcaacgactcctccgccatgccatagatagtgccgcctgcggcgaacagcgccatcagaatggggatcatccactcatctttgccgttgagtttgatagttacccgttcaataccggcatcaatcgcccccgttttattcaccacccccagaaagccgccgataatcaagacaaacagcgcgacgtcaatggcgccggcggtgtaggtttcgtggttatagaggccgtcaatcggcgccagtaaaacagcggtaatcccttgcggatgcgcgtccacgggggcatacgttcccgccaccggcacctcttttcccagcgtggcgttcatcgccatttggtattttcccgccggcacaatccaggtcatcactgcgaccagggcaataagaataaacaggatggtataagcggtgggaaatttaaatttacccatgatgttctctcctgatatcacggatatgcgccgcgagggcgcatatcctgtgggattagtcgccgagcgtcgccaccatgactgctttgatggtgtgcatccggttttccgcttcatcgaagactatcgagcctgcggactcgaacacctcttccgtgacctccagtcctttcaggccgtaagccatttcgatttcgcgtcccactttggtgtgctcgttatggaaggcgggcaggcagtgcataaacttcacatcaggattaccggtagcgtttaccacctgctggttgacctgatatggcgtcatcagactgacgcgctccgcccaggcttctttgggttctcccatcgagacccagacgtcggtatagaggaaatccacaccgtgaacgccgtcttcaacgctctccgttaaggtgatacgagcgccggtaacgctggcgatttctcggcactgcgcgaccagcgcggcatcaggccagaaggactttggcgctatcagacggatatccatgcccatcttcgccgcgcccaccatcagcgaattgcccatgttgttgcgcgcgtcgcccaggtaggcgaagctcagttccggcagcgttttgcccggcgcatgttccagcatggtcatcagatcggccaggatctgtgtggggtgaaattcatcggtcaggccgttccagacgggaacgcccgcgtattcccccagctcttccacaatgtgttgaccaaatccgcgatattcgatgccgtcatacatccgccccaggacgcgagcagtatctttcatggactctttatggccgatctgcgagccgcttgggccgagataagtcacctgcgcgccctggtcgaacgcggcgacttcaaacgcgcatcgggtgcgagtagaggttttttcaaaaatcagcgcgatgtttttgccgatcagtgtttgcttttcgcatccggctttttttgcggctttcagctcaatagccagatcgatgaggtgttggatttccgccggggtgtagtcaagcagcttcaaaaagttacgatttttcagtgaaataaccattacaatatccttgttaaaatgaattgcctgatggcgctgcgcttatccggcccacggttatgcgcgctctgtaggccgaataaggcggaagccgccatccggtaaaaagccttatgcgtcaacgtcggcggtttcacaccgaatcaaagtacctttctcgcccgcgagaatggcttgcccatccgccagcgagccgattccggcaatgccgcggcaatggctgacaaactcagcgcaggcggtcactttcgggcccatcgaaccggcgtcgaactgcatttcacgaagcagctccggcgtaacctgcgccagcgggcgttgggtgggcttgccccagtcgagatacaccgcgtcggcatcggtcagaatgagcagcgcgtcggcgtgaatttggctggcaagcagggcggcggacagatctttgtcgatcaccgcctcgataccgtggtagccatcggctttttccacgaccggcacgccgccgccgccgttacagataaccaggtgatcgcggctaatcagcgcgcggatggcatcgttttccacaatgcgtttcggctgcggggagggcacaacgcggcggaaggcgttaccgtcggctttgaatacccagcccttttctgcctgtaacgcacgggcctgcgcttcgtcgtaaatcggtccgatatatttggttggattgaggaatgccgggtcgttggcatcgacttcgacctgggtgagcaggacgctgatttcacgctccggcagatgattcttcagcgcctgttgcagcatgtagccaatcatgccctggctttccgcaccgagaatatcgagcgggtagggtgtaacgttagcgtaggcgctattttgtagcgccagcagtcctacctgtgggccgttgccgtgcactaacaccacgcgccattgccgcgtaagctgggcgatggttctggccgccagttcgatatttttacgctgaatatcagcctccagcggttcgccgcgtttgagcagcgcattgccgcccagcgcgacgaccagtgtgcgtttgttttccataacgtctcctttaaataccatcgcgttccagtggacagctcatgcagcgtgcgcccccgcgcccgcgacccagttcatcgccgggaatgggaaggacggtaatgccggctttgtcgtatttttcgttggtccagatgttgcgctcatagcccaccaccacgcctggacgcagggtgagcacgttattggcgtcattccactgttcgcgctcagcttcaaatgcgtcgccgccagtggtgattaagcgcacctgatcgatgccaagcgctgtttcaagagcatgaaccagcgtgctctcctgggttcgtttcagaccgccgcgtccgtctggcgtcagcgtccagcactgaacgtccgggcgaacgacttccggatagacggagaaggtgtcgatatcaatgtgggtcatgacggtgtcaaggtgcatacaggagcgatgttttggcagttcaacggcaatgacgcgttccgcctgacgatgtttaaacaatgcctgcgccaggaactcgacgccctgcggcgtagtacgttcagacataccgatcaacaccgcgccgcggccaatcaccagcacatcgccgccctctaaagtggcgtggtcgtaattaatgtcctcgtcgccgaaatatttaatgaaatcaccgcctgcgaattgaggatgccagcgataaatggcacgtaaattattcgtttcacgttggcgtgcaggtttcgccatggggttaattgagacgccgttatatatccagcaggacgtgtcacgggtaaataggtgattcggtaatggcttcataataaagtcattaatatcgtgagtatcgaccaccatattttttatggaggcgggaatttcgccgtaagttaaaccgccgcttaaatggcgagccagttcacggtgcggcatatccgccagccaggcgcgaatatctgcggcaaaggtgggcccaaggcgataatcggaaatttgcgtatccagtagccaggctttagcgtcagccacatccagcgtttgggtgagcaggtcggttaacagcaacacttctatcccttgctggcgcagcgtgttggcaaaaatgtcatgctcttcgccagcgcgctctacggataatacatcgtcaaaaagtaattcctgacaatttgaaggggtaagtctttttaggctgagattgggccgatgcaacattacgctgcgtaattgaccgatttcagaaccgacaaaatgcttttccatcattataccttttacataattacaagaataaagaaggagtggctgcaaatatttagcgtgcttgcagtcgcggcgtttcagttaaattcgggagcaatgattgaattttatttgggttgttaatgtgatgagattcacatcaatcaaggagtgctatttttcttacttaatatatgaaccgggtcagagaaattcaaaaaacaataaggcattaaatgaattactacgcagctatatggtttgttatttttctattgttaattatttgtttgctgtattgaatgatatttaaatcttaactcattgaaaataaagtgattatttttaatggttgcataactatgcgtgagggggattttattatcggggatatttaaataatttaaaaataactatggatagagaagtcatttatgcagggagagcgaattgtgatcgctaaaacgtttttatgttaacgcctttaatatcaaagcattgttagtgatggcaatttggcgccgctggggtttatgcataggcactgcataaagttgggcgaactattaacaatatagaaacaccgctggcgataaacatgcgctggcgcaaaatcgatgagagtaagggtagtatggcagccatttttctcgtataaagagaaaaataaaacgctgttttaactaaggggatgcgatgattattggcaatattgaacatctggaggtctggctgccgacggcgttacggcaggcgattgagcacgtcaatgcgcatgtcacgacaacgaccgcgccaggtaagtatgacattgacggcgacaggctgttttatatgatttctgaaaatatgacggagccgggcgaatcgcgcagcgcagagtatcacgctcgttatcttgatattcagattgtgctacaaggtcaggaagggatggcattcagtacccggcctgcgggaacgccgcacacggactggctggcggataaagacattgcatttttaccgacgagcgtcgacgagaaaaccgtcgtcctgaacgaaggcgactttgtggtgttttatcccggcgaagtgcataagcccctgtgcgcggtgggagaaccggcgcgggtacgtaaagcggttgtgaaaatgctgatggcgtaatattttgtgccggatggcggcgcctgcacgttgcgatcttgtaggccaaccgccatccggcatcatcacgacattatttagacagcgtcgctaccattactgctttgatggtatgcattcggttttccgcttcatcaaagacaatgctggccgcagactcaaaaacctcgtcggtcacttccatcccgccatgtaaaccgtactcttcggccatttttttgccgagcgtggtttcgtcatcatggaacgcaggcagacaatgcaggaacttaacctgcggattgccggttaaggccatcatctggctgttgacctgataatcacgcagcagggcaatacgctccgcccatttctctttgggttcgcccatagagacccaaacatcggtatagataaaatccgcgccttttacgcccgaggcgatatcttcggtcagggttatggcgccgccgttctttttcgccatggcgctgcactccgccactaacgcggcttgcggccagcaggcttttggcgcgaccagacggagatccaatcctgttaacgcggcggcttccagcatggagttacccatgttattacgcgcgtcgccggcatagaccaacgtcatctcgttaaaggctttacccggcagatgttcctgcatggtaagcagatccgccagtaattgcgttgggtgatactcatcggttaaaccgttccataccggcacaccggaatattcagccagcgtttcgacgatctcctggccatatcctcgatactgaataccgtcaaacatccggcccaggacgcgggcagtatctttgatggactctttatggccgatctggctcccgctggaacccaggtacgtcacgcgcgccccctgatcgtatgcggcaacttcgaaagagcatcgtgtccgggtcgagtctttttcgaagatgagcgcaatattcttacccaccagcttttgttcttctttaccgtttttcttatcggctttcagtttggcggcaagctgcaacagagcagtgagctcgctggcggtgaaatcaagtaactttaaaaaaggtttttggtaaaacgtagacatacttccctcacatggcttaggcctctcattgaattaaaattcactttatatggatgattattcatttgcaactctgtttgataaaacttttctcgataaggtggaggcaacgtcggcggtatgtgacaataagagtatcggcaggacatctatgaggaacgagctatggcaaacccggaattactggaagagcagcgtgaagaaacgcgcttaattattgaagagttacttgaggacggcagcgatccggatgcgctgtacactatcgagcatcacctttccgctgacgatttcgaaacgttggaaaaagccgcggtagaagcctttaaactcggctatgaagtgacggagccggaagagctggaagtggaagagggcgatacggttatttgttgcgacatcctcagcgagtgcgcgttgaacgccgaactcatcgacgctcaggttgagcaactgatgaacctggcggaaaaatatgatgttgaatacgacggctggggaacctatttcgaagaccctaatggcgaagagggtgatgacgacgattatgtcgatgaagatgacgacggcgtgcgtcactaaagctgcatagtatgacggtacggcagcgtctgctgtcgtatttttttaacaggttacgtatgaattacccgcaaatactctctccggtgcttaatttcctgcattgcccgacgccgcaggcgtggattgtccaggcccgcgatccgcaaaatcttcctcttctgcttaccgatcacctgatctgcgaactgaaggctgcgcaaaccgcgttgctgttggtgcgtaaatatgtcgccgataaatcgggcgccgacgcgctgctctcctggctgcaaccttacgaggcgttcgcgtttcgtcaggggccggagccggattttgttgccctgcataaacagattagcaaaagcgccatgccgcaaactgatgacccctggggacgtcagcttatcgaccgtatggtgttattgattaaagaggagttgcaccatttttggcaggtacgcgaggtcatgcaggccagaaacattccttatgtgaaaatcaccgccagccgctacgcgaaaggaatgttgaaagcggtacgcacgcacgaaccgctcaccttaattgataagctgatttgcggggcgtatatcgaagcccgctcctgcgaacgttttgccgctctggcgccctggctggatgaggatttacagacgttttatctctcgcttctgcgctccgaagcacggcattatcaggattacctggcgctggcgcagcagatttccgccgaggacatttctgcgcgcgtgcgctattttggcgaggtagaagctgaccttatcttgtcgccagaccgcgagtttcgttttcatagcggcgtgccagccgccggataaagggtaaaattaaagattagcgtttttatcttttacgctgtcgccacctgcgtggtcatccgcccgacatcaaactgctggcgagcagaaaaagtcattttcatgatattctgtcctgagtaaagcctgccctgcggcaggcaaaaagaactcactcagtgttatattcccgaaaggtgaccgtgaacaatgccatttttgcatcatcactacgggttcttgtgttgaaatacttactgtttcacgccttttgacgcttcagagcaggtcttgccaacaaaggtttgtttaattttgttgatggaggttgttttattacctcctgcatcgacatccgatttcatggtcatcgcaaattctgtatcgcttattttcgtcgtttctacaatagagtgcgatttgacatcaggattattacagacagtctcattgatcagtttggtatccgtactttctacaaatgttgtcgtgcaaccgcctgcactggtagaaaaacccttcaccatttttttagaatcttcagacattttaggggtataacacataagcgtcgctatgcccgaatttttttcatccattaatacttcttttgtatctggattgatggtgcgcatttctatattttccattttccattcgccgggctgtatatctaatgcatatacattagagatactaataaacatagcggggaaaacaattgctgataataggcgtttcatttataacttccttgaataataagtgattcccggataacaggatgtttccgggattatttatatcagcaaaaataatacctggcgaggataaataaacgcctggttttcagagatcctttaacatcctcacttcgcaatcgacatgtccggtgcagccgagcggttcgctaatatgttcaaatcctaaacgttcgtatagcgcaatcgcctcgcgtaaaaaagccgttgtttccagatagcagcgtttaaaaccctgttcacgggcatgatccagcgccatcagcgccagctttttcgccagcccctggccacgaatcaccggtaaaaaatacattttttgcagttcacaaatgtctggttcgctacaggataacggcgccacgccgccgccgcccaccacacaaccgttttgctctaccacccagtaggccgcgcccggttggctataaacctgatacagttcatccagattggggtcggcaacggtataacctttatcggcggtaagtccgtattccgctgaaacctgacggatgacacgggcaatagcggcattgtcggcggtagtgattcggcgcaccgtgagcgttggcgaggcgacattattcataatatggctcaatttttaaaatttatttatagattactttaataccaccgtcttgagttacgcgcaaggagatcctgaatcagacaaaataaaaggcggaaaaattaaacaaaaatagtatcgtagtcaaatcagtaacagtttactggtttttattattaattctaatagattgtaattcagggatatgattcatgaataacgttatcagtagtaaagataaccataatcacacgttggtgtttacaggcaagggcggaaagtattttgttatttgccttgtgaatttcttgttgacgtgtatcacgttgggaatctatgcgccgtgggcgatggtgaaatgtcgacgttatatttatactaacatgacgctaaacaatcagccttttgcttacaaagccacgggcggcgcattatttattagtgtgttgttagtttttattatttatattgttagcctctctcttattgaacacggtcatcccggtctcggttttacgctattcggcttattaattgcgattattccttttatggcggtgaaaggattacagtatcaggcgatgatgacttcgcttaatggcgtacattttggattccagtgttccatgcggcgcgcctggtggtacatgttcgctcttcctgtactcctgatggtggcgctttatattgttctttatattatctcactggtaaccatcgccgtcggcggtttagtgttcagtatcgtttttctcggtttgctggctattattgggataggggtcattaacggtattacctacagcaaatggatgaccttgtttggtaatggcgcaaactttggcattcatcgtttctcgattcaggttaatgttaaaacgtgcatcagagggtgcgtgttggcaatgttgacccttttcccttttgctgtcgtgattggttatctaatcgcgccggtgttcaccgacatgattcttttgagtatgatggggaatgcgcaggcaggaggggcgcttattctgcaatattatggccagataatggcatgttatttcctctattttctcgcgattattgtggtaaccagttacttatatgtggcgttacgcaacctgtttttaaacaatttgtcactggcgaacgattcgattcgttttcattcctctgtcactgcacacggtatgctgtggcggttactggtggtgtttgtgatttccggcgtgaccttagggctggcttatccgtggttgaaaatttggctggtgagctggctggcgcagaatacacaggtccagggcgatctggattcgcttgagttaaccaatgatgagaagccgctggaaaacagcccgctaatgtggatttctcgtggcattatgccttacttcccgtttatctgatgtaaaaaggccgacgtttacgtcggcccataattcatgttgtcggatggcggcgtgaatgccttatccggcctaccgatcgcgccatgtcaataagcgaacgtgtaggcctggtaagcgaagcgccatcaggctttcagattacagcgcgctaataaccgcctgctgctcaatcagtttcgctttggcttctgcgtaaccgtccagcttctcacgctctttggcaatcaccgcttccggcgcacgggcgacgaaaccttcgttggacagtttgccttcgatacgggcaatctcgccttcgattttcgccacttctttcgccagacgcgccagctcatcgtctttgttgatgaggcctgccatcgggatcagcagttcggcgccgtcgatgattttggtcacggaaaccggacctttgtcatcggctggcagcacggtgatgctttccagacgcgccagggtttgcaggaagctacggttgtcgttaacacgacgaacggcttcttcactacagccgcgcagcagcagttccagcggtttgcccggggcgatgttcatttccgcacgaatgttacgtaccgcgacgatcgcctgcttcagccactcggtatcggccagcgcggcttcatccacctgtgcggcgttatattccgggaacggctgcagcataatggtatcggcggtaatgccacagataaccttcacgcgctgccagatggtttcggtgatgaacggaatgatcggatgcgccaggcgcagcagaccttccagtacggtgaccagcgtatggcgggtgccacgcagttcagactcggaacccccggtcattaccggcttggtcagctccagataccagtcgcagaactggttccaggtgaactcgtacaggatgcccgcggcgatatcgaagcggaagctgtccagcgcgtcgcggtacgctttaacggtctggttgaattccgccaggatccaacggtcagccagcgacagcgtcatttcgccgccgttgaagccgcaatcctgctcttcggtgttcatcagcacaaagcggctggcgttccacagcttgttacagaagttacggtaaccttccagacgcttcatatcccagttgatgtcgcggccggtcgaggccagcgccgccagggtaaagcgcagggcgtcggtgccgtgcggctcaatgccgttcgggaactgcttctcggtacgcttgcgaattttctccgccatctgcggctgcatcatgttgccggtgcgtttttccagcagttccggcagggagatgccgtccaccatatccagcgggtcgataacgttacccttggatttggacatcttctggccttcgtcgtcgcgaatcagaccggtcatgtagacggtatggaacggcacctgcggcttgccgttttcatctttgatgaagtgcatggtcatcatgatcatgcgggcaatccagaagaagatgatatcgaagccggacaccatcacgctggtggggtggaactgacgcagggcgtcggtgttttccggccagccgagggtggagaaagtccacagcgcggaggagaaccaggtatcgagaacgtcttcgtcctgacgaagcgcaacgtcggcgccgaggttattttcctgacgcacttcgtcttcggtacggccaacgtagacgttgccgtcgttgtcataccatgccgggatacggtgaccccaccacagctgacgagagatacaccagtcctgaatatcgcgcatccaggagaagtacatgttttcgtactgcttcggcacgaactgaatgtcgccgttctcaaccgcttccaccgccggtttcgccagcacgtcagcacggacgtaccactggtcggtcagcatcggttcgataaccacgccgccacggtcgccgtaagggacagtcagatcgtgcggtttaatttcttccagcaggcccagcgcgtcaacggcagcaacgactgctttacgggcagcaaagcgttccagcttctggaactcagccggaatctcgctggaataaacgtcagactcttcacctttggtatcgaacacttccgcgctttcgcggatgtcgccgtcaaaggtcaggatgttgatcatcggcagggcatgacgtttcccgacctcatagtcgttaaagtcgtgcgccggggtgatcttcacgcagccggtgcctttttccatatcggcgtgttcgtcgccaacaatcggaatgcggcggttaaccagcggcagaataacgaatttaccgataagactctggtagcgcggatcttccgggttcacggccacgccggtatcgccgagaatagtttccgggcgggtggtggcgacaaccagataatctttaccgtctgcggttttcgcgccgtcggccagcggatagcggatgtgccacatcgagcctttggactcgcggttttccacttccaggtcagagatggcggtgcgcagtttcgggtcccagttcaccaggcgtttgccacggtaaatcaggtcttctttgtacaggcgaacaaagacttctttcacggcattggaaaggccttcgtccatggtgaagcgctcgcgctcccagtcaacggagttgccgagacggcgcatttggcgggtaatggtgccgccggattccgctttccactgccagattttgtcgataaacgcatcgcggccgtagtcgtgacgggttttaccttcttcagcggcaatcttgcgctcaaccaccatctgggtggcgatcccggcgtggtcggtgccgacctgccacagggtgtttttaccctgcatacgctggtaacggatcatggtatccatgatggtttgctggaaagcatgtcccatatgcaaactgccggtgacgttcggcggcgggatcatgatgcagaaggactctttgctttcgtcgccgttaggcttgaaatagccctgcttttcccagtgctcgtaaagcggctgttcgatatcttgggggttatatgtcttttccattatttccaggttgccgtattcaggttaaaaccagccacgcggtaggctttgtagcgttcgcgcgccagttgtttcaaagtttcttcgtaagggacgaagtctaccacttctgtgaaagcggtggcaaaatctgcaaagcttgtacgcaggctgattaaaatatcgcgcgggctgctgttgcgtttttgcggccaggcgatttcaaccggcgcgccgccgcgtgggccttcgcctgccagattgtgcgggacaaaactttccgccggtcttgcccacagcgcttcatccagccgaatggcctgcttctcatcttcgcaggcgatcagcacgcgcttgcccgcgcgccaacgttctgcggcaatttcacacaccagttgttcaacggcgcttaaaccgttgacggtggtgtcattatccagaagatagaacgtcgcatttttcatatatggggcttcttgtggtggatttaaatgcgttgtcatgatgcctcccgtaggccggataagcgcagcgccatccggcaaaacgcctgatggcggcgctaatgcgccttatcaggcctacggggtaatctcaaacttactcttcgccgttaaagcccgcacgattgagcaggaactgcgacagcagcgctaccggacgacccgtcgcgcctttcgctttgccggaacgccaggcggtaccggcgatatccaggtgcgcccagttgtacttacgggtaaagcgcgacaggaagcagcccgcggtgatagcgccgccaggacgaccaccaatgttcgccatatccgcaaagttggactccagttgttcctggaactcatcgcccagcggcagacgccacgcgcggtcgcccgcttgctcggacgcgccgatcagttcatgcgccagcgggttatggttcgacatcagaccggtaatgtgatggcccagcgcaatcacgcaggcgccggttagcgtcgcgacgtcaatgaccgcttccggttcgaagcgctcaacgtaggtcagcacgtcgcacaaaaccagacggccttcggcatcggtattcagcacttcaaccgtctgaccggacatggtggtcagcacgtcgcccggacgatacgcgcgtccgcccggcatgttttcacagcccgccagtacgccgataacgttaatcggaagctgaagctcggcgaccatacgcatcacgccgtaaaccgccgccgcgccgcacatgtcgtacttcatctcgtccatcccttcagatggcttgatggagatgccgccggagtcgaaggtcaggcccttacccaccagcacgatcgggcgcgcgtcttcggacggattgcccttgtactcaatcaccgacatcagcgattcattctgcgaaccgtggccgaccgccagataagcgttcatatccagttcgcgcatttgctgttcgccgatcacgcgggtaatgacatttttgctgtagctgtcggccaactggcgcgcctgtgacgccaggtaggcggcgttacagatattgggcggcatgttgccgagatctttcgcagccttaatcccggcggcgatggccagaccgtgctgaatggcgcgttcgccgctggtgagctcacggcgggtcggcacattaaagaccatcttacgtagcgggcggcgcggctcgctcttgttggtcttgagttgatcaaagctataaagcgtctctttggccgtttcgacggcctgacgcactttccagtagttgttgcggcctttgacgtgcagttcggtcaggaaacagacggcttccatcgaaccggtatcattcagagtatttatcgttttctgaataacctgcttatactgacgttcatcaagctcgcgctctttgccgcaaccaatgaggaggattcgctcggaaagaacgttaggaacatggtgcagcaacagagtctgccccggttttccttccagttcgccgcgacgcagcaatgcgctgatgtatccgtcgctaattttgtcgagctgttctgcaatcggagaaaggcgacgcggttcaaagacgcccacgacaatgcaggcactccgctgtttctccgggctaccgctttttacactgaactccatgcactatgctcctgaatcttaaagacaacagtggtggctacagctatactcgtcgtctttcaagttgcagatgcgttggctgcgcctgctcacccctgtcgcttacctgatgtaagctccggggcttcacagtcttgccgcctgcctgcaactcgaaatccattagagtatagaaattgaaagctttcgtaactcatatccgctgttgcggtgacttcgtgttaatcttaacgttattacggcattggcacgtcagaacaagttctgagaggtgaatccgctgagtataatgatcttagcgatgatttcgacgactcaagagaataaatgacgtttaagccatgaaacaagctaaattccagcaaaaaaatgggtttttacgggcgtatttaaagtgataatcataagatatctggtgcgggagacgctcaaaagccagctggcgatactcttcatcttacttttgatcttcttttgtcaaaagttagtgaggattctcggcgcggcggttgacggcgatattcccgcaaatctggtgctctcgcttctggggctgggcgtaccggaaatggcgcagctcatcctgcctttaagcctgttcctggggctgctgatgacgctgggcaaactgtataccgaaagtgaaattacggtcatgcacgcctgtgggttgagcaaagccgtgctggtaaaggccgccatggtactggcgttatttaccggtatccttgcggcggttaacgtgatgtgggccggcccctggtcgtcaaaacaccaggatgaagtactggcggaggcgaaagcgaaccccggtatggcggcgttggcgcagggacaattccagcaggcgaccaacggcaactcggtgctgttcatcgaaagcgttgacggcagcgacttccacgatgttttcctggcgcaaattcgccctaagggcaatgctcgtccttctgtagtcgtggccgattccggacaccttactcagttgcgcgatggttcccaggttgtcaccttaaacaaagggacgcgttttgaagggacggcgttgctacgcgattttcgcatcaccgacttccagaactatcaggcaattattggccatcaggccgtggcgctggacccgaacgatactgaccagatggacatgcgcacgctgtggaataccgacaacgatcgcgctcgcgccgagctgcactggcgtatcacgttagtctttaccgtatttatgatggcgctgatggtcgtgccgctcagcgtggtgaatccacgtcaggggcgtgtcttgtctatgttgcccgccatgctgctttatctgctgttcttcctgatccagacctccattaaatcgaatggcggtaaaggcaaactggacccggttatctggatgtgggcggtcaacctgatctatctggcgttggcgattggtttaaacctgtgggatacggtgccggtccgccgcctgcgtgcccgttttctgcgtaaaggagcggtataatgcagccatttggtgtacttgaccgctatatcggtaaaaccatttttaccaccatcatgatgacgttgttcatgctggtgtcgctctccgggatcatcaagtttgtcgatcagctgaaaaaagcggggcagggtaactacgacgcgctgggcgcgggtatgtacaccctgctcagcgtacctaaggatatccagatcttctttcctatggcggcgctgcttggcgcgctgctgggactggggatgctggcgcagcgtagcgaactggtggtgatgcaggcatcgggtttcacccgtatgcaggtggcgctgtcggtgatgaaaacggctatccccctggtgctgttaaccatggcgatcggcgaatgggtcgccccgcagggcgagcagatggcgcgtaactatcgtgcgcaggcgatgtatggcggttcgctgctttccacccagcaaggtctgtgggcgaaagacgggaataactttgtctatattgaacgggtgaagggcgacgaggagctggccggcattagtatttacgctttcaacgatcagcgtcgtttgcagtcagtgcgttacgccgcttcggcaaaattcgacccggagcataaggtctggcgtttgtcgcaggtggatgagtccgatctgcaaaacccgaaacagatcaccggttcgcagacggtgagcggcacctggaaaacgaatctgacgccggataagttaggcgtggtggcgctggacccggatgcgctttccatcagcggtctgcataactacgttaaatatctgaagtcgagcggacaggacgccggacgttatcagctcaatatgtggagtaaaatcttccagccgctctccgtggcggtgatgatgctgatggcgctgtcgtttatctttggaccgctgcgtagtgtgccgatgggcgtgcgcgtggtgacggggattagcttcggcttcgtcttttacgttctcgaccagatttttggcccgctgacgctggtatacggcattccgccgattgtcggcgcgctgctgccgagcgcgtctttcttcctgattagcctctggctaatgctgcgtaagtcgtaatcacagtaatcgtaggcctgatggcgctgcgcttatcaggcctaccatgacccgtaggcctgataagtcctttccgccgccatccggcagaccgcctggtattcctcgaatgatgtagtgcgtaacctgacgcgtggcgcttttggctacgcgttaagctcaggcaagctgcgggaaaaagtagaacaaaaaatttataacgtgctgccgtgataaatctgataacccaaatcaatcgtattatggttgagatcgttatttttaattttgttgagcaacatctgcgcggctctgcgcccgatctcaaaacgaggggtaattacgctggcgaggctcggtatcatttgcctgcccatctccagaccgtggaagccggcgatggagatctgctccggtacggccagttgacgctcgcggcaccacagtagagcgcccattgcgatatcgtcatttgtacaaaagacgccatccacgtccgggtgcgcagtaagcgcatcacgcattagctgtatccccagatggatagaggagatagcgcgtggattgatgcgcaacggcgccagcccccggcgcgtcatcgcatcgcagtagccgtgataacgctgctcatctcggatatcgtcttttgaacccagatagaggatttttcgccgctggcgtttatccagcatggtgctgaccatatcaaaggcggcctgacggttatcaaaccccacctccatatctaagcgatcgccctggatgtccatgagttctacaatcggaagggtagctgagcgcaggaatttgacggttctgagggtatgatatttttctgaaagaataatgccgtcgatattgtaagacagtaaattgataacggactcttcttccgaatcgcgattgtaattgtaattcgcaatgagagtttggtagttatgacccgacgttacggattcaatcccggcaagaatgtcggcaaacaactggttctggaaagaggggatcagcacgcccagagtgtaactttgcgcgtttaacagcatagctggcgcgcgatttggtatgtagttaatttcctccatgatctgcgcaatacgctcgccggtttccctggcgacttttttcggcgagcggatgtaacggctcaccgtcatttttgtcacgccagcaagcgtagcgatatcctgcaaagaaattctgtgattcctcatgttttctccagtaccggaggcgggaacgtcgcccccatggttaattgggctgcggatgatgaattaatgcagaaccgcattcagcgccagtacgcccagcaaccccatgacagaaatcaatgtttccataacggtccaggtgcgtagggtttccccgacgctaagattaaaataccctttaaacagccaaaaaccgggatcgttaacatgtgatgcaataacgcttcccgcgcctgtcgccagtaccattaacgccggatcggcgtgggttacgttaataatcggcaatacgacgcccgctgtggttatcgcagccacggtcgcggaacctaacgcaatacgcagcacggcggctaccgtccagcacattaataacggagatagcgaggtgccggtcattaattgcgagatatattgacccacgccgctatccaccagcacttgcttaaacgcgccgccgcccgcgatgataaaaacaatcatcgcaatagcgccaatggactcgccgacgatatccatcacctgctcaaccgtacgtccgttgcgtcggcccagcgtaaaaatggcgatgataatggcaataaacaacgccactgctggattaccgataaattcgaagaaaacccgcacggcattcgtttttggcagcgtgatttcacataccgctgcgatggccatcagaatgaccgggatcacggcggcaaaaatactgttccagaatgacggcatctcctcttcactgaataggtgaggattaaataatccttcaggcggcgctttctcaaagcgcgccagcaattttgaaaacagagggccggcaacaatcacggtcggtatggtaatgattaacccatacagcagggtcgtaccgagatttgcctcaaaaattgtcgcaatagcagtagggccgggatgcggcggcaggaagcagtgcgtaacggataaggcggcgaccattggaaccccgacatacagcaagggcagtcccgatgaggccacaatcgtaaaaacgagcggcaacagcagtacgaatccgacttcaaaaaacattgccaggccgacgataagcccggtgatcaccagcgcccattgcacgcgttttttgccgaacgtattaatgagcgtcgtcgcaatgcgctgcgcggcgccggtatcggaaattaatcttcccagcatcgcgccaaaaccgaggatcatggcgagtccgcccagagtaccgccaattccgttttgtatggagtgcaggacgtcttgcgcgcccatcccttcggcaaatcccaccacggcggcaaccagaacaagggcgataaagccgttaactttaaagccaatcattaaaaccaacagcagcgcaacgcctgccgcaataattattaatggcatattcgtctctcttattagcgccaaaatagcagcgcttacgcgctgcgtcgtatttccctggtcagacggcaaccagcataccgccatcgacaaacagcagatgtccgttaacaaagtcggaggcttttgacgagagaaacaccgctgcgccaataagctcctggggatcgccccagcgtgcggcaggcgtacgtttgcatagccaggaggtgaaggcttcatcttcaaccagcgctttggtcatctccgttttgaagtaccccggcgcaataccgttgacctggatattatgacgcgccagctccacgcacatgccgcgagtcagcatcttcacggcacccttcgacgcggcgtatggcgtaatcgtgtcgcggcccagctcgctttgcatcgaacagatgttgatcacttttcctgcctgccgcgccaccatacggcgcgtaacggcctgagagacgagaaaaaccgcggtctgatttacggcgatgacgtcattccactcctgttcgggaaactcagtaaacggatgacggcgctggataccggcgttatttatcaggacgtcaatgacgccgatatctttttcgatatgttcaaccgcagcttcaatatcctgtttatgggtgacattaaaaggagcggcaatagcctttatcccttcctgctgaagtttcgtcacggctgtttcggcgcgctccggggtgatatcgttaacaataatgcgcgcgccatagcgaccaagaccggtcgccagcaaataaccaattccctgagcggctccggtgataaggatatttttacctgccagtgaaaaaagatcgttcatgatagtgtcccttattttactttctcagaaaacgagctgaacttttgccgcctgtgttttgtctccggcaaagatcagcgccgcttccaggtcggtaaatggatattccgcgctcagtaacggcagcggattgataacgcggttggcaagccaggaaaccgcagtattaaattcggtagtaaagcggaaagagcctttcagggagatctctttgcttattaccatcatcatcgggaagttgggaactgcgccgcccatgccaacctgcaccatcacgcctttggcccgtgtgacttccagacacgttgagatagaggaaggatgcccagagacttcaaaactgatatcgaaataccctttttctgctttccagtcatcgagagaatcatgctgtgggttcaccagcgtatccgcgcccatctgccgggccagcgagagagaacgggtactgatatcggcacataccacttccgccgcgcccagcgtttttaccgcgctaacaatcaggcagccgatagggccaacgccggagataaagatgcgtttgccctgcagatcgcccgcctcatgagctgcatgaatggcaaccgccagcggctcggcaaaggccatggctttttcgtccgcctgttccggccagggaatgcactgagcggtatcgacagctttaaatcgggtaaaaccgccatcgacatgcggaaaatacatggcgctgccaaagaaacgcatttcagtacagtggttttcttcatgctgcagacagtatttgcaatgaccgcaaggctccgatggattaattgctaccggttgtccttcacgtaataaatctgagtcgctatgaacgattttgccaatcacttcatgacctaaaatcattggcgcttttactgtaaaattgccgactttgccttcctgataataatgtaagtcagacccacaaatgccgccacgggtaatttgtacgagagttcctttattattccattcaatattttgttccgtaacggcaacagcacgcttacccgcaacaacgcaggattgagtttttacttccataaattcctcactggtcaggtagttaccctgaacgcatttaagcggttttatttgtcactatttgtgacttatgtcacgctggaaaattgttacactacaatgttacgcataacgtgatgtgccttagagttcttctctatggaaattaaaaaacgtgaaattgtcgaacgtagaggcgtaatattgtgttgtggaatatgactcagaggtatttaaatggccggggaaagctatattttaatgggtgtttcaggtagtggtaagtctttaataggcagcaaaattgcaacattattttctgcgaagtttattgacggcgatgatctccatccggcgaaaaacattgataaaatgtctcagggaataccgttaactgatgaagaccgcttaccctggctggaacgattaaatgacgcttcatacagtctttataaaaaaaatgagacgggatttattgtttgctcgtcattaaaaaaacagtaccgcgatattttacgtaagagtagccctaacgtacatttcctgtggctggatggcgattacgctactattctgcagcgaatgcagcgtcgtgccgggcattttatgccgccagacctgctgcaaagtcagtttgatgcgctggagcgaccctgtgccgatgaacatgatattgcgcgtatcgatgttaatcatgacatcgagcacgtgacggagcagtgccgactggctgtacaggcttttcgtcaggcactcagcgcttcctgatcattgtcaaagcgctgagtcaggcggtcagaagtcagcttttagcactacacgatagcgggctttgccgtcgcgaacgtgctggatagcctcgttgatttgtgacattgcgaacagttccgtggtgggcgcgactttactgcgtccggcgaatttcatcagtttgcgaagttcatatggcgttccggttgccgagcctgagatactgcgatcgccggcaattaatgtaaacgccggtacgggcagcggcttcaataccgccccaacggtatggaagttgccgccataggtcagcgcttcgaagtagggttgccagtcgagatcgacgttaaccgtgttaataatgagatcgaactgacccgccagtgcttttaacgcttccggatcgcggctgttcaccacgttattggcccccatcgccagcacttcctgctccttcgatggatttgagctgaacgcggtgacttcgcagcccatcgcgtgtaacagctttatggcgatatgccccagcccgccaataccgatgacgccaacgcggctggtagcagtaatatggtgcatcaatagcggtttaaagaccgtaatgccgccacataacagcgggcctgcggacgccatatctatattctccggaagaggaattacccactgccagcctgcgcgaagcttctcggcaaaaccgccacgattgaggatagtgggcactgcgccttcctggcagttaatttgattgccgctgatacaggcatcgcagtgtccgcagctgcgcgccgtccagccgattccaacgcgctggccgacttttagccccttatcctgtgccgcgctgccgagtgcggccacccgaccgatgacctcatgtccggcaaccagagggtattgagagaacccccattcattgtcgatcattgacagatcggaatggcagatcccgcagtagtcgacccgtacctcgacatcttccggttggagttctcccgcgtcatattcatagagttcgagctcgccgcccgcctctttggcggcatagctttttattatcgtcattgtgtttcccttaatgtggtgttgaactgaaaagtgtagagcatggaggcaagggacgcccggcgttaatctgctggagaaggcgggaagtagcctgattattctatttaatactcaacgctgctgaaattttcagcacttagcgatacaggtgtatgctcgtgcttgcatggtggcgtatgacaggtataatccacaacgttttccgcatacctcttcagtgccgaagtggcgaaatcggtagacgcagttgattcaaaatcaaccgtagaaatacgtgccggttcgagtccggccttcggcaccaagtgatgcaataattagctgcctaatggtggctttttttgtgtccatttccgtccaaattcgtccatatccatctgtaattcaaagataatttatttttctgtaatagatatatttattttgtggtctttccgtgttggtcgtttttcatccattaacatccacgcgatctgggggcaaaaaggggcaaacccggttcgatagaggagtgccccccaaatggcgcttacagatctcgcaatccggcatgccaggctgcctggcaaggcatacaggctctttgactgccacggtttttacattcaggtgaaccccagcggatccaagctgtggtatctgaaatttcgctttggaaacaaaaagaaccgtatggcattaggcccttatccgctcatttctcttgcactggcaagggagaagcaagcggatataagaaggcttattttagaaggtattaatccggcggaaaaacgcagagaggacaagcggggtggcgagcctctttaatacgttcgagtccgtagtgcgcaaatgcgtctccagcaacgtgaactggtcgacggaacattcgacagcgttattttctgagcttacaggttttccaatattgcactgaacgctatccagtcgggttcacgggcttctggagcgagctgcgcagccgataatcctctactgcttcagttataacgctattatgtgacatgcagcatgatatggtcgttttctgaactccgtataacctgagtatttgtattgaagcgtgaacaaaacattgcagccagcctttcaacgtggacaatagttattcatacggtgattttatattcgataaatcaatgggtttcattgaaacataggactggtaatggatgacaatgctttagggtttgcctcatactggcgcaattcgctggcagatgctgagtcaggaaagggcagttttgaacgcaaagacgccaaaaatttcacccactggcatgggatagcggcgggacgtcttgacgaaacgatcgttggtaaattttttgagggagaaaaagacgacgtcgaaacagtcgatgtcatcttgcggccaaaggtttatttccggttactgcagcgtggaaaggaccattccgctggtgcgcctgatattgttaccccgatagtgacgccagccctattgagccgtgaaggttttttatatccgacgccagcgacctccattcccagagacctgcttgaacctttgccaaaaggggcattttcaattggtgagattgagcagtacgacaaatacaaaacgacacatacgtcattctctatcaactttgatgaccgcgttgataagaccgccgaaacagatgaagaacgagaagcacgatatgcagcctggcagcaggattggcgtcaatatctggatgattcagaaaggctgctgaagaacgttgtcggcgactggattaaaaatcctgagcaatatgaactcgctgagcacggttatattgttaaaacggcgcaatctggcggcgccagtttccatatcctttcactttatgatcacctgcttgtttgcaaaaaggatgtgccgctcttcaatcgtttcgcctcgcgagaggttcatgctgcagagtcattacttcctccggaagcaaaattcagcgacaggattggacactccggggataagtttccgctggcaaaggctcagcgcgatgccttaagccattttctggatgcgaggcatggcgatatccttgccgttaatggtcccccgggaaccggaaaaaccacgctggtgctttctatcatcgccacgcagtgggcccgagcggctctcgaaaaagcggaacctccggttattatcgcgacttcaacgaataaccaagctgtaacgaacattatcgaggcgttcgggaaagatttttcccaaggcactggtgcaatggccggacgatggttgccggagctgaaaagcttcggcgcttattttccctcaagcactcgtaaagccgaggccgccaaaaaatatcaaactgaagatttcttcaaccaggttgagtcaaaagagtatgtagaggatgcactgctgttttatctggagaaagctaaggcagcctttcctgaaaaagagtgttcatcccctgaaaaggttattgaactcctgcatggtcagttggcagcaaaatccgagcaactggtaagactgaacgcaacatggcaaacgttaagccaggttcgggcaacgcgagagcttattgataacgacattgagcaatatctcgataatttaaataaattactctccgggcaagaacaaaaagttactcaactaaaaagtgctaaagcggaatggaaaaaatatcgggccagtgaatcactgatctatccattattttcatggctaccagtggttcgcagtaagcggcagtaccaaatacaactgtttctcgaagataaattaggtgcgctgattgcgggaaatcaatggtcggatcctgaaaccatcgaacgtaatatcgataggttgcttaattccgccgagcgcgagcaaacaacctaccggcagcagattgactccgcgcatgaaatcgttcttaaagaacagcaggcggctcaggaatggcagaggctggcacttgatttagggcatgagggcgacgaggaactgagcttctcacaggcagatgagctggctgatacgcagattcgcttccctgcattcttactgacgacccactactgggaaggtcgttggttgatggatatggccggcattgatgatctgcagaaagaaaagggcaagaaaggtgctaaaggggtaacagctcgctggcaacgccgaatgaaacttaccccatgcgtggtcatgacctgctatatgctgcccggcaatatgcagataagtgaacataaagggcagcgtaaattcgagaaaagctatttatatgacttcgccgatttactcattgtcgatgaagctgggcaggtgcttcctgaagtggctgctgcctcgtttgccttagctaaaaaggcattagtgattggtgatacggaacagatcccgccaatatggagtattactcctgctattgatataggtaacatgctggcggaaaaaattctgtcaggcagtacgcaagaggagattactgagaaatatacggcaatcgcagagcttggtaaaagcgccgcatctggcagcgtcatgaaaatagcgcagtgtgcctcacgctatcaatatgatcccgaactggctcgtggaatgtacttatatgaacaccgccggtgcttcgataatattattggatactgcaatacgctctgctatcacggtaagttgttgcctaaaagagggtgtgaagagagcaatttaatgccagcaatgggttatctccatattgatggtaaaggagagctggcaagtagcggaagtcgatataatttgctggaggctgaaacgatagcggcctggctgacagataaccagcaaagtattgaagcgcattatggtaaatcgcttcatgaagttgtcggtatcgtgacgccttttagtgcgcaggtaccgaccatcaaacaggcgctggataaacaaggcatcagcgcaggcaccaatgaaacgtcgctcacggtgggcacagtccattctcttcagggcgctgaaagagcgattgttatattctcgccagtctattcaaagcatgaagacggcgcgtttattgatagcgataacagcatgctgaatgttgctgtctcccgagctaaggacagtttcctggtcttcggcgatatggacctgtttgagattcagccagcctcatctccgcggggattactggcaaaatatctctttgagtcagagaagaatgcgctcacttttgattataaagagcgtaaggatttaaaaactgccgagaccaaaatctacacactccatggtgtggagcagcatgataatttcctgaatcagacgtttgaaaataccgataaacacatcacgatagtttctccatggctaacctggcaaaaactggagcaaaccggttttcttgattccatgattacggcgtgttcacgtggtattaacgtcacggtagtcactgacagaagctacaacactgaacataatgattttgagaagcgaaaagagaagcagcagaaccttaaagcggcgctggagaaactgaacgcccttggtattgcgacaaaactggtcaatcgtgttcatagcaaaattgttattggtgatgatggtttgctgtgcgtgggatcgttcaactggtttagcgcgacacgtgaagcgcgatatgaacgatacgatacatcgatggtttattgcggtgataacctgaagggtgagattgaggctatttataatagtcttgataggcgtcaggtttagggcaggagtgtgattagccatcttatcagtgtttccccagggtaagatggctgtgaggcattttcagaaggaatcattgtggcgactaaaatgtggatgatccgcggtgatggcggaaaattgtacgatgacttcagagacaagcaggttgttgctatcggctggtcgcagctcgctccctatgtgaaaccgggatgctcaagagagcagttgtttacccggtatcaggagcttgagccacagactaagtcaggcacagttcgttccggtgcttcgcaggtctggcgctttgtgaacgagatgcagaaaggtgactgggctatcacttattcaccttctaatcggacttatttgatagggaaaatcgcctcagattttgagtttcatgccgagtggcttgaagatggcatgggcatcgcccgtaaagtgaagtggaacgcggaagagattaagcgtgatagtctgagtgatgcaaccagaaacacccttggctcaacgctgacggtttttcaggtgcctgattttgccgtgaatgaattagtgcagggcaaaaagcctgtctcagatgtcgtgccggaagtacctgtttcaggtgaagaggatgaggttgtttctaatcctctgcgtgacatggaaatgattgcctttgaaggcatcaaagatcgtatcaaccgtctcgactgggatgagatgcaaaatctggtcgcaggcgtgttacgcagcatgggatataaaacccaggtatcgcctgcgggtgctgaccgcgaaaaagacatcattgcttcgcctgacggttttggcttcgaaaatccgcgcatcattgttgaggtgaagcaccgacgggaacagatgagcagccagcaaatccgtagctttatcggtggccgtcataaagacgatcgcgggttgtatgtcagcacaggcggattcagcaaggatgcgcgctatgaggccgatcgctctacaatcccgttgacgctatggacgctggacgatttagtacgtgcgttagtggaaaactatgagcaggtggatattgaaactaagctgttggttccacttaagaaaacgtacttgcctgcatgaagggaaaccaggggttacagtaatcgtagtgatatttagactaatatgaattttaactaaaataacgacgatattgattttatcgaggagtttgacccactcctcgatatatttagtttactcccaacgccttataaaccgcatctacaggttcagagtaaaaactgacctggaatttggtaaacaactcggctggcacagtcggaatatctaccgcggaagacatcggcaaaaggacctttttcgcgccactatcgaaagcaagttgtaagctagccgccagatcctgaaccgggttgatcacaccaccgagcgtcatgctacctaacacgaccatttgttcctgaacgggtttcgccagtaaaacggaacacagcgcgatcagcgcggcaagactggtcgcggtacttggtccagtattgtgcaattcgactacgtgcaggtggtactcatgttcagaaaatttcgctgttgcgctaacgcggctgaggttgcctttgaaatagtcaaatccaacccggatggcttccttagccgaggtgcttgatcccagaccagaaacgctatgcttaccattgcctgcggtcatctgagtttcgaagcgatacagacccgtcatgccactttccgcttgcgtaaccaaatgcactacaccaggtttgggcatgccagcaggaattaattcgctgccaccctgttccggcacgctgacgaagaattcttccagcgtctcgttatcaatgtagctgaaatttacatcgaagaactccagaccgcccagctttttaagctgttctttgacgcgacggcgagcttccatggcgtaggtcaggcaaacacggacatcttctttgctgtaagaaccattggggtgaagaagtttcagtagaccagaaaccgtgcgccttaccgcgataacgtcgcgctggttgaggttattacccagcttatagaacttatcaatcgcgtcggagaagctgcgcttacgcatttcccgcatgtattcggcgagataatctgtgataaggccgtagcgattggtaaagaattccgggcgcattttcggaatttcccagccggggatataggcatggaagcggtcgaaaaacgccgtatcgatcatcgcggcagggaagggggctaacagatggctggttttgactagcgtctcaacgctttggttaatgttgccgacgaacaccatcgatgctttgccttcaatcgaatctcttccgcgggaaaacgagccagacgccatgtaatccttcatgatttgcacgccgtctttgtctttgaaagtgatccccgccacttcatcaaacgcgacgacatcccacatgccaaccaggccaatctggcggctggccatgttgtaaaacaggttggctaccgtggtttgcccgccggaaactaacagtgagtttggcgaacattctttatagacgtggcttttaccggtgccgcgtggacccagttcgcagacgttatagttgttttccacgaaagggatcatgcgggtgatcaggtgccacttggttcgctgctcaatgttagcgggttccatacccacggaacgtagcaggacatcaatccactggtcgcggttgaagtgcgtacgtgcggtaaatacctcttccatgtccatattgggcatctggataggtttaagcgtcatcagagagaagggcgacgttttttgtccttcctcaaagaagtagttcacggtgatcatgcaccagatgccgccggtcaacagcttctcgttgtccttgaccatctgcggcggaaccagtgcatctttaatgccgaggttggagagctgggcttcgtaaacgtctttcttctgattgagctttaccgatactttatcaatgatcttgtaggatcctcgctcacgaatgagcgatttcaccttctctgcttcatcagggcggacgtagttatcagccagaatacgcttaacgttctgcaacccttgctcgacgatctggtcatcgtcggaagcgcagtacataccgagcagatactccagcacatagaccgggacatttgccccttctttgagctgtttagtcaggtccttacgtactacccgaccacgaaaatgctgattcagcaaggcgtccagatcgtaaccttctgcgacgagttccccttcggatacagctggaacgggtaagtcatgatgggtttgcatagcgcctcacttaaaagaaatcatcctgaaatgccagatcgataatcacagggtacttctggtaacccgtttccgtttgtgcatcttccagtatcagccagtattcattacggcgattgaaattcgcgccaatcagcttcagcgtcacgtcacgcacgcgtttttccattgtgttgttatcgctgtcaaagcagattcgctctttaccggataccacattattggcgttatcgacgatgaagatgttcagagtacgtggttcgtataactcacctaccggatgggtttgcagcaggctgactttatcaatgttattgacgagtttgatcagcggatgatgcttgacgatgtctaccggacgacgctgaggttgcttctcggcagccgttttctgcagtgctttcacctgcaatacgggaacgcagacttcctgtagcatggcgccaccatggacaaaccgcgcgccgcccgagaaatggaaacgctggatccctttcgggatcaggaactcgctgttatcgctgacgcctgcggtatccgccacttttcctttccagcaaaaatcatcggcaggaagctgatgaccgataataaagcgtttgtggtttttaatcgtattgtctggcttgatctgcagcgtggttttatcctggccggaaaggggctgctgctggaacaggaaaccgtggtccgccgtgacgataatccgtgtaccgtggagacggtttattacacgagtcactaaatctttcagttcaaccaccgcgttacggcacgcttcgaaggtcttctcctccgtcgatgcgctgtcacccatggcatcaatggtgttatgccagatataaacgacttcgtaatcgcgaataagatctcgtccttgctgatttttccatttcagcagatcgtccgattttactgccatccctttatatttcttcagaatggtatcgcggttaggcgtacctgaggtggataacccgtccgcataaacgatgtcaccactacccggttggtagcatatctcgtcatggggcagcaatgccgccattcccagctgggtatagctgggtaacacgcccaactgggaacgcagttcggcagtaaagcgtttctcggtattgatctggttgcccagctcttctgccacttcataacgcagcgcgtcggagataatcacgaatacgcgcttgatttgtggattgttaaactgcggcttaaccacctcattgtagaagttctgctgccgtggtacgcccgcaatacgccactcctgcatacggttttcggtttccagaaccttattccagctccggcttaattctgccaggtaccagttggaatacagcgcttcgatatagtcatccaggcttttcaggatcattgcgcctttgctgtgaaccaacagcgcgtattcgttaaacaggcggtaggcctggtcaaagcggaacagctcctcgcagtacgctttccagaacgttgcgctgtcctgatagtggaaaccatcaatatgacgattacgcagattcagcaaccgttcggcctgacgcagtgcatcgtaaatagcgcagtattcctgacgcgtctggcaccagtatttgctctgacgttcagacagaagcttcttaaaggcttcacggtctagcgtggtgctctcttccagaagctgcgtcaccagcgcatgaatgatggtctgttcaatgctcagcgtggtttcgcactcgtgcagatcatacggcgagctgagacggtactggtcttctggtcgcagcgcatcctgcatctgctgtgcgcaataatcataggcttctttgtagcgacggtcggcgcgccaggtgaccataaaggccagcgcggaggctctgcctgacggcgtggccagcacgtttttttccagccattcgcgtttctgcggatcagcctgcgcggaaagatcggtacagaacagcttgaggatcaggttttccagggtcggatgctcggcctgatagcccatttcctgattcagaatgtcccacagaacgccttccaggtcgtggcgtttcagcatcgccagcgtgttttccaggtcgctgtcgtcatctttctgctgattaacgtattgggtaatcaggctgaacagaatctcttccgtttttgctgtttttacgccagcgatgaccgcaaccatcttcttatcaagagaagcttcgttttcttgctcagtgaccaggcctttcaaggcagaaagacgtttagtgctgaaaaatgccttccggcgttgaatgtgctcgcgtaggccaagctgtggaatacctaatgtattcagcgtaatggcggcgaaatcggcgtggaactccgtactataaagacgaatatccaatagccagtcgaactcttttgggggggcatcgtgggggaaccacagcaaaaactgctgttccggctcgtcgatttcaatgcgctttttaaccgccagctgcgactggtcggtcatatcaagcagcgtgacgttttcgagttcgaggttatccagctcttcgaggaaacgcttatcgggatcgtgccagaaaacgatgcgatgttcggcgaattttgctttaaggccggcaataaattcctgattttgcaaggtcacaatcccatttcattccagataaaagttaaatcgtcaggtacgggtaacgtgcggaacagatctttttgacgttgttcacgagcccgctgacccaaaagctgggttagcaaggggtcaattgcctgttcgaaaaacattttaccatgaaagcactgtgttaattgcgtcgttggggagcgtgcggcgatgttagttttttgcgtttgtatctgggctaacaagacatcgggatccagatgctggctccactgccgtaagcattgttcaacttcagcatcattctgtgctgtattaagatcatgaaacgcagtattaaaaccggcagcgcgcagccgttcccaaagaggatggataacattccaaagtgcggcatggttccgccattgaggtaaaacatcatgaacggcctggataaatgcctgtatgccgccattgatcgcctgctgatgttttggctgaaacaccagccaaagttcttccggcgcgatcagataactttcaatacaaaaacgcggaagaaccagtagattagctagatttcgacgcttttcagcgatctgcacgtcagtccatgcgtcacgatcaaccacgcccagccagttggcttcaagggctaacgcctcaagcacatttttcttagaacctgctggtgcaaggatccaatcttgttcccatgccggaaattttctgctgaggaaattctggaaagccgtgacatcatctgtaccttcaaccagcagtacccgtctgccggttgtggccactttttgttctttaatgtcccgaataatttgcttaacgctggccattttccgcatccttgccatcggttaaatcaatccgcaatcccatgttgtcataacgttgccagatatccgttgcgtgtgaagtcatcacaagctgaccatttttcctggcaacgatgttctcaatggatgccagcaacggcgatatcagggacggatgcagatgcagatccggctcatcaatgagtacaacaccgccgggctgtagccagcgttgtaccgtaaacagcataatcagcacctgatgttcgccggagctaagcgcatctaacgaatgatcattccctgaatccagtaggacacgttgccgctgtcctggatgaatttcagcttcgatacgtttaccgctgaagaactggtttagcgtggcgatcatttcaggatattcaccgggcatggttgccttcatattgaagagcgacgattcaagctgacctttccagttatcgttcacttcataggttgccagccaggcttgagttgaatcatccggggacaggctgccgatatctttttgcgggcgaacccagcggcgcgcttcggcatccaggtaaaccagattaggcatatcaacacttggtcccttcagtacaagccgttgatactggctactccagtgactccaccagttcttatagggaagaaaaaagtgttccgatgacgtaaaaacggtcgtctctggcgttgttccctttgttctgcttaccgtttccccgagccagtagacctgtgggtatttctcttttagttgtactaaaaatgcctctgagccaagaaatagccctatttggtcctccgattttggcgaaaaggaatcgagaatcatcgcgcagctggcatcccagcgatagaaccaggtataagattcatctttgatattcaggcgcgtacccgtgcccagccaatgcccaaaggcgcgccataataaggaaatggctcgtaacagcgtcgatttaccgcagccgtttggcccggtaatcaggacattggattctatctcgcctgaccagtcgttttcaaaacgaatttcaccgtcgggcagcggtccgacggattgcgtataaatcgccgctattttcattaaataatctccggtgcattgccggtaatggctttcacatccgccagcagatcgccaaacttaccgtagttaaccttaacgccgtcgtcgagatcaatactgattctcatatcagcatagtggcgcaggcgatcgtcgaagctgcgcagttcgttgaattttttgctcaggctatcacgctcacgtttcagacgggtggcttcgccgcctgaggctccatcgacctgttcgttcaggcgatcgatattggcctgatagcgcgccagcagcggcactacatattcggtacgcattctcgccagcgtcgcatcgttgtagcgatgcagatagaccaggcactcaaacgctttctctttaccggagctgaacagccagtatatcggacgctttttatacatcttcatatgatctttccagaactgagtggaaagatagcggcggatggtatccagcgcagattcgcctttttttggttttatcgcgtataaacagaggctttcggcgataaattcgagattttcctgcaagtgttcttcgccccaaacggtgcgaacaaactctttgacgcgagaggtaacgtcatcgtcaaaccactcgtcatccatcagcggcaggataccgtcattgtcagccgggaaggttttgtacgcgtcttcagcgaccagttcggcaaagcctttattgccttcatgggcatagaccagtccttcgcgatcgagggagtagcggcccatcatgcagccgatgatgtagcttaagatatctatagtgatatcagtgtaatacttattggttagatcggtatgatcttgaatatttttatatcgatagtttggattacatagtagagttatttcactttgcaatacagctttaattatagttttgtcaagttgtaatttatctataaaaatattatttatagtattttctattaggagaagtgtttcgactaacttgatatttgtattgattttttgtttgtagatattccgtagcaattgagttgaattgtgttcaagcaatggtgaacaaacataatcccatgattgctcttgagagtcccagtcatttttagctatttcaatagcattggtgactaattcgataatttcatcttcaatttctggatatggtactgaggctaattcaccactagtaaagctaagtgtgggggctagtattgataaataatggtttacaaccggagtgcacattaatcccgcagcgtaaagcaactcatttttgttatttgaaaagccgcaacggcctgtatcatcaaaaacaaacccttttggacgatatctcacgcaaaaattaccttggcttatttttgaccatgttatgccttctctaaagtaatactcatcatttcttacggcagagcgagttttgccattctcaaatttaaaatttcgtatttcgtaaccattattttcccaatttacaactatttcgttattaccataccactttcgatattcacctccactactacaaggaaaccatttgatattatgaatgtcgatttttgtatttgattctttatttgtgataagggttttttttattgaaacctcgtaccaatatctttgaaatttaatattgtcaccggtggacatgcctgcttttaatgctattttttctccaagttttttatggtggcgaaaagataatagactcagtaagtctatccaatatgctattggcattcctggtatgtttttaaaatcatgctgtgtaaatttatcaaatatatttttccttagaagtagatcgcttttctttacttcttccctaccatctataagtctaaaaaatacaggttggtaacgttcggagtgttggtttttaatcacccaggcagttgtctgtacaacctctccagaaatttgcccaaaagcccgagctcccaaatgtgccatcgtaataaatgttttattgtccaataaccagttacgtagtgcttcataacttgacaaaaacatccatgattgcatattgacttgagcattaaacccattttctttaagcaaagaaaatgcattctgcataaacattgcaaacaaatcagctttactatccgggaagttatttttggcaaactctttcagctcactattcattcccttgccacccatatacggcggattcgccactaccgcatcataccgctgcgccaggatccacgcctgctgaatatacggaataaacgctttcgccgctgccttctgctggaaatcgccttcctgctccatgcgatatagcgcttcgagaaacgccttcagttccgcctcttcttcctgtggcacctggatcagcgagcccagcgttttggcgttcacaaagcgcttcagcgtgcgcatcagcagctgatattctgcgctgtcggtatgggctaatgctgtattttcggcaaacatatcccccatgctaccagtctggttctgctggtggaagttcagctgctgccacagcttagcaatatccagatgcaggctctcctgcagggagacaatattcagacgcacgtcgcgggtgaatatccggcggtcatcctgacgggccatcattaataaggcaaagccggaaagctgggcagcacggtcgtcaatgtcgagaccaaaaatattattttccagaattagctgtggaatatcgcgggcgcgatagccgcgctcttcatagatatttttcagcacattatagacttcaatcagaatatgcccggagccgcaggccgggtcgagtactttgatgctttccggttcaatactggcaggtgtaatggcggccagctgcgcctgcacttctggcgtctgttcggctggctcaatgtagtagtccattttgcctttcagcggcgaatccgggtaggtctgcaaccactggcggccgacggagttctgtaccagatactgcacaatccagtttggggtaaacagctgggtggcggcaggaatatcttcgctcttcaccaccttaccgataaccgcatcttttttctcagagatatagaactgatacagccagccgataacctcaacttcttgccagtcttcttccggaataccgtccaccagaccgcgtagaatggagtcggtgcgggtcaggttatccggcagcagtagttcagcttcatcgtccacagcttcaaacaggaacggcatcgcgcggtgcagggcgtggcactgggccagcagcagttcacggtagatggcttcgtcctggttgccggaaagcttcatctcgaccagctgcgcctttttctctggtagtaatgcttccgcgacttccggtacgtggtccagcacttcaaagcctgtcgggttatccgggtgcgagagcatgtggaagccgtggtcaagataaccgtggatttccatataacgaatggcgcacaggcggttgaaccaggtgtaggcacagtgctcaaccagcacgtcaaagccctgctcgcgggcgcgttttaccagacgatcgcggcgggtgagggtggatttggggtagtcgaactgaccatagcgcatggtttcgccgacgagctcggcatccgcaatttgcagattgccttttttatcagcggaaatccccagcgtggttagcttttggatcaccgcatcgcggaactggttacgggcctgtggagcgtattttttgatgttattggtattcatagaaaatcctgcaaagggcagcagagcgctgccctgaaatgggggttactgaagacgaatccggtcacctgcctcaatagctgccagcagcgaagtacgaagcgtatccagcgctttttccacctgttcggcggtttccagcacttcgccaccggtggctttgcgcatctcgctggcgacattcaccagatgcgtttttttcggtaccggttggataacgggtttctctaccacaacataagtctgttgtgactcggccgcgcgtttagcttcattcgctgctcgtaactgggcttcctgctttttacgcagctcgtcgatccactggttaatcttcttctcggcatccgtttgcagtgccattgtttcttgctgttccgccagaatttccggaattgactggctgacctcggcacgttttctggctttttgcatcggcagcagaacgctgttttgcagctctgacgtggcatgcgcttcctgcaagcgttgacggctttcctcaatgcgggcgtcaatgcgttcaagggcgtgctggcggtgctgttccactaactgatgattgacgttctggacctgttcaatcagtggtgtgatgcgattgagatgcttataaggttccggcatctgccagatgttttccagctcgcccagtgcttttaccgccacggcgtctttttccagcgcgctgcggttggatttaaagctgccgttcagcgccgcgcctagtttttgccaggtagcaaactgcttgcggtagaaatcgaccaaattttcacgatcttcactgaaatccagaagctcattgacctggctggtgaccttctcaatcagggcaaaatcttctttttcactcagaatggaattcagcaggcgcaggcctgactcaatctcatctttacctggattgtttccaccttccgctttcgctttgaagacattcagctcttgcttccagtcattgaagacctggcggatatgttcaaccagggccggttcttcacgttcgctaaacggctgttgggcaatttccgccatagtttgtgcggccttacgaatttgcgattcgtcgtgacggcgaattttgtgcagacgcagctcgctgtggcgacggctgttattaaacagctcccacacctgcttacgctcgatattgttattctgctggctgaagctgaatttgcctttgcgcgccagacgggcaaccagcagcttcacttcttcttccggccatccataaggacggcgggcaaagtggttcagaatatcgcgtaaataaaccggcttattgaactcgatattcatgctgacccaggtttctacttcgcgcatcgcgtcggggttgggttcctccagttcgcccagatccagctccgcatcattctccaccgtgagtagtgcatggatttcacgtgcgatatcaccgttgaacgggcgcagcattttcagcttggcaaacgtgttttcaatcacatagcggcaagcttcatccacgatgctggatggcgtcgaagatttcttcggtaagcgctcgccaatcgcccagacgtcagcttcggcaataagcgactccagctgaacgcggagcattttctcgcgaacgctgttctcacgggctttttctgaaagcagactggcttgttccggtcgctgacctgcgttgtccctgaggaatttttccgtttggacgaccaaatcaatatcggtccaggtccgggcatcggcaggtaaacgaattaaaatgcagccgtctccctcagaggtgtatgggcggcatgccgcgtcgttgtcatagaaatcataggtcggatcttttggcgtgaggatctttaccaccagatcgttaagcattgcgccgtctaacgggtgcccgttcaggaagcggctgatatcaaagtcctgcttatttgccggatagcgatacttccggtttttcagaatgtcatcaaagatgatcgaggccagtttcttgttgatcgcggagaagtcgacttcgacgttacggatctcgttctcgatctctttttcttcgttggtcagaaacacgtatttgtcttcaacacgtgcaatcaacatttctcgttccagcttattcaggcttttttcaacgcgacggcgtagttcgactttatcggtatcgattttgtctatcgaaagggtaaccaggttatctaatgtacttttcagcacatcgacgtagcggatcaggaacagtgttttcagtaagttgccatcgaactcatcaagaatgccattctggcaggcctgagtgatggtgcggctgacggccggctccaggaagctttcaatcgcggcataaaaacgccagaagggaaccagagaatccagaccctgcggggagatctgctgtgccgcagtctggaaggcttctaactgtgagcgttcacccatggctaactgtttaccggcggcacctttggtccggatagactcaaaaaccttctgcagaatctggtagtgccacgggacaaacgggtagttatcaataaattcttcttcgctggtgtaggggcgcaaagaagcggtggttgtgggatcaaaagcaagctggttacgtagaatgtcgcctttttcctgccagactttcgccagcgcgggttttgcggcatcggttttcaccagcaaacgtttttggataacttcggaggtgttggagcttgaaagctgcaaacgggtagagaaacggccttgaattttagagaaatcttgtccgtcacggctgctcatcccaccaatggccgcattaatatccgcctgggaagtaacaataacccatgcgcgtccaccacagataacacccagattttcagtgatagtctgcagcttcaacatcatctgcgtatttttaccgatgaactggccgacttcatccaccatgaagaggatatttttgccgttttcatccagccactctttgacccactggcaaaaattattgatatctaatgggaaattcttatccagctgttccacccattgacgcgaagcgtcaacgctttgaccggtggcctggcttagggcttctgccatttcatcgctgatgaaatagtaggaatcgcgctctttttcccagcttgagtcagtgatagtggcgaatgcggtcttaaacgcgtcgtattggccgcgtttagccagctcacgctccagatgggcgatgtgcggaaaatcagcacagtagccaacccgttcgttaaataccttcaggaagactttaaggatggcgtcttctttgtcatcgacgttagcacgagaatcaatattgaacagaatcacttccgtcggatgatggaccgctttgttgatatcagcgaggaacagagcatctttgattttgtcttcaaagaaggagtaagcatgacgttctgtaccgttatggctgactttgcggttagacaacagatacgacagaatcttgataaagtgtgatttacctgagccaaagaaccctgacacccatacgccaattttgttttccatgcgtatgcgatccggaccggttgccggaacataagattcaaagaagtggcgaagatgcccttccagttcccgggtgatgacgtattcatcaagctcaatccaggcactggcatcgtccgtctgttcggctttcacaacgccattaatatttcggtccagacgtttctcaaagatctgttcaatattcattgctgtgctctttaacgaggattcaatgtcgccgcaggcccgctttcgggtaccagcctgaaggcgcgataataatttcgggaatcaatgcccgccaatggggagagatcgtgtccgctataggttcccggataaaacatcagcaggggggtaaaacccatcacgtcctgcaaggcgctcatcagctcatggccacgaaccagcggccaggcgttacccattcctgtcagaatgacaaactcttgattctgaagatcgactttttttgctatgtaatccgcgatctttttctgattcaataagccaacgagttgttttttcagcgcttcggtaccgactttcacttcctgctgacagacgcggtcaaataacccacgttcagtgagcatgtcgacgatgatctgaaagatgttgaggtgcgcgaacttgtggtccttttccagattacgcaacagatacttcaggtgttcacgcacctgcagctcattctgagcaggataatcaaaaatccagaacccaatctcattaccggagccgttgtttttgagaaagcgctcttcgctaatgcggctctgaacctgtgacaggcggtattcaagcacgggatcgatcaccgttgtccctccagaatagaaactaattcttgttgtccaaggcgctgcaaggtcgcctgagtttctggtaaaagaaagaccgactggagattacgccgacgaggtgtatccagataaccagcttcagccagtgctttgatcaagttgttacccatttttttgatggatgaatctgagtaactggtgagtacgggctgctgacgaagatggttagccacaaactcatcccagctatccatagggagcttttctttaaattgtctgcacaggtcgttcaccacttcagccaggaagtctttaacaaccggtgaatggaggatcagagcgacgaacagcaattgctgacgctcgcgctcgctcccttcagcaataagcgaccacgccactttatcaagcgtattcaggcgtagttttatcgttgtagcatagcgcttcgccgtattggcagaggaagcctggagaatgttatgacccacgatctgctcttgccaggtttgttcattgggagcggtaagcatgagctcagcgatgattcgactttccctgctcatcagcggcccgcctagcaggtctccaatccatgccttgtcgtttttcatcgtcatatctaccctctgaagactgctatgcagctcgcaaaaaaacaaacgatgattgtaatgggggaaggggcgggatgccatgagaaaaggcaatttgtgagatgaaagccattacggagaccggtatttatccatccctttgaaaaaatgatttttacagtttgttcattgagttactgatttgacagattattcggaacggtaagtcatataaatcttttgtacttcggggtcatccaggctttcataagagatgttctttttatctaaaccatccagccccttgatcccgccaataatagccagccaggcactccggtctgtgatgctcacaacgaatggttccaggtaacgatcaaggtgctttttggatggttctccgatttcgtcgctgagtgccttcaaatagtaggtaatcggccacggttctcgcactatggtctgtagcgcgctggtggagtcacacctgtagtcaagtgacgcgtagagcgccagatgaaccattacgagcgcaagcagaatttataagggcggtgccttaaagagcacagggagattgtaagtagcccgatattgctggcttttgcttagcttgctgacgggattcgtcgtatgaaacatgaaaattacctcatgttttatataaggattcgacactatatcaaaaccggtaactctcaatctttcaaagctatgtgtcagatcaggtcgtgataagacacataaatttaaagatctatatatctggccagatagacttttttataacagctttataaattaaacaaatctgccatagagacagatttgtttaatttataattagaggtttgcaacgttatgatatactttttgcacatcatcatcatcttcaagggcatcaacaagtccttcaaagatttctaaatcttctggtgaaagttcaacttctgattgagcaatcatttctaattctgttgttgaaaattcagaaattccagctgcttttagcgctgcgattcctttatgcaggtctgtagcttcagtataaataacgatgtttccttcttcttcggttacatcacgaacatcaacttcagcatcaagcaaaatttcaaaaatatggtcagggtctgttcctttaaatacaatcactccagtattgtcaaacatatagctgacagcacctgccgctccgatattcccgccttttttattaaaaattgtgcggatattagcaatcgtacggttaacattagacgtcaacgtttcagcgataaccattgaaccattgggtccaaagccttcataacgcccttgcacgaacgtttcatctccgccacctttggctttatcaatagctttatcaataacatgttttggaacctgtgcttgtttcgcacgttcaataacgaattttaaagctgagtttgattccgggtctggttcaccttgtttagcagcagcatagatttctacaccaaattttgcatatactttagacgttgcaccgtctttagctgttttcttagcaacaatatttgcccatttacgtcccactggaaacatctcctcaaaaaattatttacattaatggcaggttaataacctgcatgtttttctgccgtattatatcataatatataaattctcgtctatgagaaataaaaacatccagcttttacggggggttactttgattttaacaatggctaatatggtgggtaagccattttttaattttcttctggttctttttttatttttaataattgaattgcagcaataacgtcttattgatggtggtgtcgctcatcaggtgaggtggaacgcttgcacgtcttgcgacatattgtggcagaaacttaatggcgaaattaagagcctatcccattagggctattttacttgccattttggacctgggcagtgctcaaaatcctcacgtactacgtgtacgctccggtttttgtgcgctgtccgtgtccaaactggctgcgccaataacgcctggtgggatagtctctaaggcgatatattcccgccttgagccgtgttaatttgttggatacttttaaatggaggtatacctcttgtaggctatacctcctgcttcacgttatcgcgcgattaacgcaaatacgccccagccaaagtattctcgcgtccaggtgacgtgacgtttgggggctaccgtcagttctgttcgaacctcttgcgcaaactcatcgtcagggttttcctccagccagcggcgcatggtcatccacttcgcggcttcatatctgtcccagccttgcgggtccgccagcaccatttccactacgtcatagccgagttggtcaaaaaaggcgaccagctcgggcaggggacggaaatcggcgacggatgagacgccacaggcgtgggcgatctcttccgttgcggggatccgacgccagtacggttcaccgatgagaatgatcccgccaggtttgaggcttttggccagcagatctattgtccccgcgacaccgcccgcaatccaggtagcgcctacgcaggccgccacgtcatatttttcctcatcaatataaccggccgcgtcgttatgaataaaatgtacatattcactgacgccgagctcttctgcacgttgttttgcctgtgtggtgaagagcgggcttatgtcaatgccagtacctgtaacaccgtaatcgcgagcccaggtgcagagcatctcacccgaaccgctaccgagatcgagaatccgcatgcctggtttcatgcgtaacgcatggcccagcgtggcgtacttttccgctgtaaacggattatggatacggtgttcgctttcgctaatggtaaaaatacgtgggatatccattgggttattccttttactgagggcaataccctcagaagtggatactttttcaaccagcagcgcaaacagcttgcctgcaaaagtctcgccgaccggccaggtgtgactgtccgggcgctgcaacacagtgaagccagcatcaccaagcaggctgatatattcatcatcgcgccaggccttcatttgactgccgaaacgggtggtacagccgttttccgctatcgcccagaactgcgttgagctggtttgggcctcttcatcccaggcattttccgttaacagcagatgaggctcggcaagaaacaggccgtgcggacaacgctgccagcctggctgcgccatgccctggcgtttaacttcatcgaaggtatgcacttcaacaagcagtttgccatcgggtttcaaccactgagcgcaatgactgatgaggctttgcgcatcagcagcgctaaagacattcagttccccaaacgtcatcataatgaaatcaaaaggttccgtggggtggtatgtacgaatatcctgctgaatgtagtcaatattcaggtttgcggcttgcgcctgctggcgagcccatgtgatggatgccggagagaaatctacgcctgtgcagtgaaacccacgctccgctaacaggcgggtataaaaaccggggccacagccgagatccagaatgcgggcgccagcgggtaactgacgggtaatccatgttacctgttgctcaatcacggttagccggcggctggcccagtcgtggtcctgcgacagatgattttccagcatgcgttggctgaaggctggctcgtcccaggggattttgccttcatcgggtaatagccgaatgcgatgcgttgcaaaaataacggcgctgatatccatcatcatctccttagcgattgtcaggctgggcgcgaacgttgttcagcccggttgtattaatgcggtagggctgaccgttaacggatttgatcagctttttggttttgagttttttgaatacagcgagcgtgcaatcggcgagcaacagcccttcgcggctatagcactcaacggcggtgacgcggcctgacgcatcgcggatgtgcgtaatgcgtccgcctttggcgagaacgtgtaaggtacgttgttcctgacgggataaattcatactgaagaacctgtttaatcatcataggctaaacgtgcaaacacactgcggtgtccgcattcgatttcggcgcattgataatcagtccggcctgaaaaggtcgggtaactgattatcagatgatgacattctccagcatcaaagcctcgggttgagttgaaaggtatttacgtcgtgaatgataacacctgatttctgtaagtgaataaccgggagtgaaaagtgtgatctcaaagggaggctcatgacgtttagcgtatcagatgaatagctcccgcaattaccataatgaatattgattaaactcatatacccgataatgaccgctttgatagtctcggcgtatctttttagccattgacagggttgttgcgttggaaatctttttttaaccaactgaaaaatatcacttaaatatttttcatacataaacatttatggtccgctgagttcggatccggttttgtatgggttaaaaaaggtacgttatgaaagtcatatggactgtcactcctgtggggtatcagcgcatagcgaaacgttgcccttcatgcagcgtaaaacgggacttcacgccttctggggcatttcgggttaattcgcaaaagaaggtactcgatgtctggagtatctataaatgcacacactgcgattacacctggaatatctccctgttctcacgcctaccagtcagcaaaattaaccgcgatctttattgccggctgatggcgaatgatgctgccacggtgcaatattttgcttatgacaacgcgatcctgaagcgaaacaatgctgaattatcggggcagcctgattttcacattcaggaacggtggctggtcagtatcgcctcccacaagcaggtcagtgttagcgtcaggatttcccgttcttttcaggtcagcctgctgtcgattttgaagaagcaactcctgctaagcgcagccgaaatcaagagacggattgaaacagggcaaataagtggcgtcacgatgaaaatgcttaaatcgcgaaaactgaagaatgcgaaatatgatttgcagctctcagttgaaacactgtatgaccggcgaaggattgttctgacctgtcgataaaaataataagctcaccttacgtttaagtgtgctggtatggcaacgacgcaacggaatgaaagaaggattaagggacaggtgagctttagttgaataacgcttgtctgtggcattcagtgaaggctgaatgccatggataatccagattttcgcaccagtgatgatattgtatggattctttgcgcaagccagcagaatgacaaagggcgatgggttacaattatctgtagagtaaacaaaaggaatataatgtggcgctatacaatatctctgagaaaatactgactacccttgaaaaaacatctttcaccatcgaaaggctgcaggaacgctatgatcttcaggaggctatcaagaagaatattgatattgtcgcgccgggctgccttgtcatatccgaagaattctctgattgggaggatagtcggcggaggattgatttattagcgattgacaagcaggccaatttggttgtcattgaactgaaacgtgatgaaatcggcgcgcatatggaactgcaggcgctaaggtatgcggcaatgatttcaacgatgagttttgcgaaagcatgcgaatattatcaggcatatctttggaagcatgggatcgatgagaatgcaaaagagaagttactggattttgtggagttagaagaaaacgaactcgctgattttggtaaagatattcgcatcgttctggcatcagcggatttcagtaaagaattaacgacaaccgcaatatggctaagagataaaggtgtcgatattcgctgtgttcgcttaacgccttacaactttaagggtgaagtgctgattaatgctgaacaaataataccagtccctgaactggaagaatatcaggtcagattcagagagaaacgcacggaacaaattattagcagtcaaaagtcggagagggattattccttatataaatataaaggaaaaaccttcaataaacggaagcttgcacttgaacttttcactgactggattaataaacataatcctgcgaatatagatgatctcaagaataaattgagtgaagacttacagaaaagaacagtagcactggttgagcagatccctgaaaaaaggaaaaacagatatcatatgcaggaagatgcgttgattgagttgccgtccggtgagcgtattgctatatcgaatcaatgggggttagggactatagaactgcttattgattttgttcgtcaggataattttgtagttgaaaaagtaggttgacaggaagtaataataaaatagatcccattcattaatgggatctcacgtttcatccgatacgaagaccatggtctctttgtcagtagcgtcataattacgcaagcctctttactttgcttatcatttatatttaatgtaaatattcacgcaacaccattaaaaaataagaaaaaatggctcactgttgaactgatattaatacctgaaccactgaattagagtaatgtggcgctattcatagcgtaattttttctgttgcggttacagggggaggaatgcacacctttagaccatactcactaaggcatagcgatctgttatatgaagatattccgttagaaatacgcgagcaaataatcttattgattatcaatacgctaggaaactgctcctctttttatgatatgacattatactgctatcataatagtcattctgacgaagtttatcgaagaatatgtaaaacgttgcgcaaagagtatggcttattcaccttatatgcgcattcaacgtcatatctggatgaaatgagtaatctgttattaaaaacagatgataaaagaaagcatattgataccattgagcttgcttttaactatatagatacctaccttcggacctatgaagttacgcttgggttagaaccggataaggcgattagtgaattaaataatatatttcatgagcatagtttaaaatatcgatatgaaaatggtaggattgtaaggttgcgcagaataaaacggcttaaaaacatatgttattatttgtactcccctggagagtatggctttgtcgaatatgatcttatggaagcgtataatcgcctgatgcttaatgattttgcctgtgtcgtaaaggaatgtcatgcagtcttcagaagcgttcttctcagaattcatgagagaaaaggtatcgtatatcatgaacaagatagtttaaataccttaatgactaatctgatggcgagaggcgttatatctgctgaatatgcacataaatttcattttttaagtaacgtgctggagtcagaaatatttctgccgatggcgccagaaaaatcgcatcatcactacgcaatgatgctccgtatctctgaagagttggcctgtagtatctattatcttactgagcggagtatattttttcttacccagcgggctgaagaagacagtgtcgcgccataataatgatcgcgctgtcgctcagtcagactggatcatcgttatttaaatttgttcagacgtcggaattttttgttctgccgtctgtttttttagtgatgagctgttcagtgcaataataaggggtacagtacgatgactgatttttaaactgcatatcatctgtgtcgcatttactcatgggtattgggtcagggagagagaagaatgagcactattttaaagccttttttattggcggtaaccctgatgttaatcttaataaggcctggctttgcaacggaggatggagcgataaccatggttaaaacctacagcgcttatgactatttgcagacccgagcgcggttgatgcacgctgtcgccgatcacggtctggtgttatttggggaatttgaccatgccagagcggcacagaatgttaacctgaaaatgccgccgacaacggttctggtctttggcaatcctaaaggcggaacgcctctcatgctggcgcatcccgaactggcgctggatttaccgtttcgggtgctcattagccagcaagccgatgggcgaacgttagtcagttatcatcccgctgaaacgctgcaacgttatggtcttgatgccgcagacatacaggctttgaaaaaactggaacagctcgttgaaaaaagtctccactaaagctgaaaatcgggcgatgtgtttgcacaagtgatgtcgcgaataaatgcggtcacatcgtccattacctgatgcgataaggcggcatcgaaggtggcgctatcagcatcacagaacccgtgccgcgcatcgtacattttacactgcacccgggggcgcttttccagcgcctgccgcatggcgaggggatcaaacgctggctcataacgcgcgacaataaccagtgtcggacagagaggcgcaagatgaaggtactggcgtatacgggaaccgtaatagcaaacgacgccatcgcataacccactggctgcacttagccatgcgagcgttgcgccgacgctatatcctacgacgattagcgtctcgtactgcgttctgagatcgtggagtaatgtggtaacgacggcgggatcaaagccgacatttgctgaaaagtgacggtaagcctcctcctgctgttcatagcgaaagggggtatggtgaggaaacagcgcgggaatatagatgtcgaatccgcgcgtcatccattcatggcctgcgcgttggatatgagcgttaataccataaatttcatgcagaataatcgctgcccggcgatggcggctcgacaaactggaggcgttgcttcccccggatacgcctggggcgaaaaacacggtgtcttttatcataacgcgttcttgatacaaagagagcggctggattttcgccgatcacgctatgtcagaggcattattcctgtcaatgtacagacacattttatggcctgatttttggttgataaattttatattggtaaaccaatatgctgttcatattcaggcatcagggctaaaggtggaacatcagtcgtgtattgtctattgcctttcctttcatctggcctcactagcgaaacggcgcgcattattattttgttggttgaccagtttcgcgtttttggtgtgctacgcgtgctatccctctttacaaatgctatagtctgataccgggaaatcgcatcggacgggcacgaccaatatgaaatcaaacacttctcagcaaagaccttaccaggaagtgggcgcaatgatacgggatctgattgttcagacgccgtaccgccccggggagcgcttgccgccggaaagagagatcgctgagaggctcaatgtgacgcgtaccgtcgtgcgtgaagcgctgatcatgctggaaattaaaggtctggttgaagtccgccgcggcgccgggatctacgtgctcgacagcgcggataataacgagatggaaggcgctgacgtcaatcactgtaatgacgccgggccttttgaactgttgcaggcgcgtcagttgctggaaagcaatatcgctgaatttgccgctctgcaggccacccgcgaagacatcattaaaatgcgccaggcgttacaactggaagagcgagagctcgcctccagcgcgccgggcggctcagaaagcggcgatatgcagtttcatctggccattgccgaagcgacccataacagtatgttggtagagctcttccgtcagtcctggcaatggcgtgaaaataatccgatgtggctccagcttcatagccatctgggcgatacgctttaccgtaaggagtggctggtcgatcataagcagatcctcgcggcgttaattaagaaagacgcccgcgcagcgaagctggcgatgtggcagcacctggaaaacgtgaagcagcgtctgctggagttttccaatgttgatgacatctactttgatggctatctgtttgagtcatggccgctggacaacgttgatgcctgattatacctggaatagcgtgggcagacccagtccacgttttacttcctgtagcgtcttttgagtgacctcatgggcccgctcgctaccttttttcagtaattccattagcattcccttatctgcaataaaggttgcccgtcgttcgcgtatgggcgcgatcagttcttgcaggcaggtctccagctcatttttacagacacggtcgcctaatccgccttgttgataatgtgctttcatcgccgcgactttggctttatccggatgaaacgcatccagccacgtaaagacgacgttaccttctatttttcccggatcgctaatttttaaatgattgggatcggtgtacatcgcgctgaccgcacggtggatggtctcttcgctggcggaaagaagcagggtattgccgagcgatttcgacatcttggcgctgccgtcaatgccgggcagacgacccgtatcgctcaggagcgcctgacagggtcgcaataccggcgaggagaaaagactattcatcttatgaacgatctcattcgtttgctcaatcatgggcaattggtcgtcgccaaccggtaccatttcggccttaaaggcggtgatatctgccgcctggctaatgggatacgccatgaacccgaccggcagggaacgggtaaagcctttttgggcaatctcattttttaccgtaggattacgctccactcgggcgacggtaacaatattcatatacagcaccgttaattcggcgagggcgggtaacgcggattgcaggcagatcgtcgtcagcgtgggatcgatgccgacggccagatagtcagctaacacttgcggaatattatcgcggattttttgcggattactgccgttatcggtgagtccctgcaggtcggcaatcaggacatactgttggtgatcctgctgtagcgcgacgcgctggcgcagtgaaccgacataatggccgaggtgcagcgagccggtggggcgatcgccagtcagaatgataggaagggtgttcattaaggactcctttatgcttactgtaaagccgaaagacgtcccgaaacgcagtagccgcctttcggcggctacttaaagagggatagtgatccgtgccgccttcaggaaggcagccaccagcggagatgacgttgcgtagcgttggatcgtttcgtgttcatgtgatctaacgtatcacgactaaacgtaagggtaaagcggctggcgtatcgtccgggcataaagtcatatcgcctgaacagataacatctcactgactttgaaacgcgattttataatttgctgcccaaaaatacgtggcgctgaaaggcgcatttttgatgcaaatcatttattactgtgataacactgcgcgcgataaaaacattaaatatattcacatagtaaatatgttctattggaatggttgttttcgatatgacaaaagtctaaaaaacccattgatgtgaaaaggaataagaattgtctatattccgattcggtggaattaagtaatttctcggataaaaataagaaatgatattgatatttcttttttgatatggttcttatagcggctatggttattcaggaaacgatgcttgaatgcctggcgtaatagatttcaggtcagtagcgctattgtaaaatggattgttgatggcagaaggtatttagcaagaatccagttatagcagattgtcggtatttaatctggtatacagagacaccaacgaaatggctggaaaatggaacgttctttcattgttggcgttccgtccttgtcagcctgctttgccgcatgataatcacggaggggggatggacgccatctatttaaaactggacggtattgaaggcgaaagccggatcaaaggttttgaaaaccaaataaaacttattgcttacaaccacaacccgacaaaacgggagtccggcgaagcgagagggacatatattggagggttgacgctgacaaagccagtcgatcttgctacaccaggcctctatgagcactattgtaacgggaaaacggtgaaagaaggcgtgctgacattatgccgtcgtgataagggcgcaatgctgccatttattatttatacgctcaccaatgtgcgaatttcacgcatgagcaatcatggagacgccgaaggcagcgccacggagaccgtggatttggtttatagccatattcgctgggatattcccgcattagcgtcgaaaagcaaaacacggcggcctcttcaccgacaggcgctgtggcgatgaggacaaaacaagcttgcggactcgcagtgggcgatgctgtatagcgaaatggcatttagcggcttgcgaaggctgatgagcgctcatgtaaccaatcgattgcctgaaaaggcgataacgcgtggcccttacacccgttatgatttttacgcatagccgctaataaaacggcattttttatatacacatcaagttgatagtgtgtttctgaccttgacgtaaataagcgggaaaagcgatgaaacacaccattgggatactgggggggatgggacctgcggcaacggcggatatgttggaaaaatttgttgaattgcgacatgccagttgtgatcaacaacacatcccgctcattgtcagctctatccctgatattcccgatcgtacagcatgtctgttatccggcgggccttcgccataccgttatctggagcgttatctgcatatgctggaagacgccggggcggagtgtatcgttatcccatgcaacactgcgcattattggtttgatgatttacagaacgtcgcgaaagcgcgaatgatcagcatcctggacgctaccctgggggatattccgccatcggcgcggcacgttgggctgctggcgaccaatgcgacgctggcgaccgggttatatcaaaagaaagcgctggcgcgggggctgacgttaattcagccagaagacgcggggcaggcgttggtaatgcaggctatttatacgcttaaacgtggcgataaaactgcggcgcaagcgctgctgctgccgcaaatcgatagccttattgcccgtggcgctcaggcaattatcatggggtgtaccgaaattccgcttattgtggccggacatgaacgcgcgatagcgtgcccgatgattgattccacagcgtcgctggtgcgcgcggcgattcgttggtatgagtcctggccagacacccgcgcctctttgaccggggagcaacgccttaccgcctgaggtgtttacagcgcggcctgaagcccacgcaggtcgcgccaaaatgtttcggctacctgactcatgcgggtattcatgcgataagcataagcctggatcgggataaccagttcgtcggcatcaagcactatcaggcgcccgtcggtaatctcctgacggatagcatactcgggcaaccaggcgattccgcagccgtccatcgcaacctgttttaacaattcactcatcgaagagacgaaaaatgtactgaaactcagttcagcatggcgagtcagggtacgatttatcaatcggcccatataggagttctgactgtaattaagcaggggaaagtgcggctgctcaagcgtatagcgcggctcgccccggccattgttggcgcaaaccggaaacagtctcgactcaaacaggcggatattatcaaacggcgcttgttgcaggttttcatcgtgataagaaaagataaaatcgctttgcccctcacgtaacatatccaccgcctggtcgacatctatcgcctcaacggcgtaggtaaactgcgtaggcatctgcttaacgatggtcggcaacaggccgagggagagcgagtgggcggcggcaatcttgattttacgcagcgtataatcgctgccgccgcgcagttcggtcagattactttccagctgctgtaacaggtggcgaacctgggagtgaaagattttaccctgttcggaaagctgtagcggcgagacctgtcggttaaacagttcaacgcccacggcatgttccagggcgcgaatccgccggctaaaagcgggttgcgatacgttgcggataatggcggcctgagagaaattgcggcacttttccagcgtcagaaaatcatatagccattttgtctcaatattgtgcaaacctgctccagttacatccatttaccgttatcctgtcagccgcccgaaggggcattctacgtccattcgggcggctgacaaccgcttatcccatcctctttcagaatgccgtgatggggcagcctgaaactagcgggaattacgccggttcaaaggtaccttttacgcaggctttcccctcattgaccatgcgtttgccgcgcgcatacacctgctcaatgcgtaaatctgcgctaaagacgagcagatccgcatcgttaccgggacggatttcgcctttgccgtccagactgaggaaggcggctacgctggtcgtcagcggacgcagagcattggccaggctgaatccgtagtggttaaccagcgtctgcaacgtctccagcaaactttcgaagcccgcgacgccgatacccgtcagatttccggcagcgtcaaatagcggctggctgccgttaccgtctgaactgagcgtcacccgggaaagcgggacgccggcttttaccgctctggcaatgccctccgccggcgcgacgggatccggaatactggtggtaatgtcgatcacgccgcctttaagcgcaaacgccagcgcctgctcgaaaagagattcgctacggttgacgtgggtaggcagcagtttaccgatcggcacgtcgctgttttccaggatgtcatacagcggctgtaacccttttttgctgctgcccatatgaaaaacgctgacaccaggtttgccccccagcaggccgccaacgcgtgattcggcggccatgctggcgagttgattcccgctgggcgcggcggaacggtggtcggagactgcgcatttcacgccaatgacgcggtcgatcagcgcgacgtctttttctaccgagccagtaatggtcggcgacggaacgtgataagcgcccgtgagcatccaggcggtgatcccctcctcatttagcgctcgcgttttggctaacagcgacgcgggatgacggctgacggagtcggtgccaagcaggccgacgaccgttgttatcccggcttccgtcaggcggctcagagagacttccggcgtccgcgtcgtcggccccgcttcgccgccgccgccgatcagatgaacgtgttggtcgataaagcccgggcacagcatacggccgctaagattaatcaccgtacagtccggtacgatatcgccggggatgccagcgccgacggcaataattttgccattcgcgagtagaacatcgcagatgccccggtcttctggcgcaaacaggtgcgcaccctgtaataaggtaaactccgcggcggataaatcaggcatgataactccttattaaacaataagctgcatgacccagatcgacagcagcgcattgatggcgcagactgcgataatatgcgggtaatatttggcgttgacttcggcagtaccgagacagcggccgacattctgtaccgggtttcccatcaggtaaatggctggcagtagtacggtaacatcgtggccgcttagcgcgccggcggtagccagactggccgccacgccaacggcgccgcccatactcatcagcgaagccagaagcaccgtagccgcttcgccgggaagcccccacaacgccatcacgggctggcagatatggcctacccagtcgagcagaccggtaattttcagcgcctgaataatgacaaatgccatgaccacattgggtaacaggttggtcgtggcgatggtaaaaccgcggcgtgcgccatcgataaacatatccatgacattcttacgtacctgagtcgtcatgattgggctccttgcgcagggtgacggcgttcttcgatgttaatccagatgcgcaaaaggtttgcgccgataaatttgaatagcagaatgaccaccagcggaatgatgactgacgttcccagaaaggcgaataccgcaacgccggaggagaaatagttggtgataatagcgctgccgctggtctgccaggcggcaaaaatcactttatcgcgttcagtgatttcgccttcctgcgccagttctttggtcatacccgccgcggcgtcggtattttgcaggttggcgatcagcgccagtgagcaaatgccaggaatgccaagcaacggtttcaggatgggcgtcatcagttgctgcgccgcccgcagaccgcccagtccatccgtaatcgcgatgatacccagagaaaggataaccgacggtgccagctccagcgcaaaaaggaagccatctttcgcgcccgttccgcccgcgccacgaaaggtctgcgtaccggtcacatgaccgaatgacccgttgagtacggtaaaatcaaaaacgcgccaccagccttcgcttccggaaaatacgccggaaaagaaaataatggtgagaaaaaacgccaggtatccctttatcccgaccttttctgtatcaagcggcatggccgccccgtccacttgttgcgccatagcgatccccgaatttttttgatgatgtgttggttgtagccacaggccaaaaagcccgaaacagaaagaccttatcagccataagggtaaggacaaaatgcaagtatgtatcgtgctatgcgtttcttgcatagcagcgcgaaaaatcaccatcctcgctactgccggaggcgcggggaaccgtggacggtataacgcgaggtaaaaaagcaaagaaacaggtgttgacgcaggccggagctgggagcaggaaaaaaggagaaataaatttgacgttagtcaatttcacgccacttaattatcgttgttaaaaaataggattttttaacctaaattttacttttttactgtaatttttcacgccttaagaggaattgtcacggtcaggtcagtagccgctgataggtcagcttgcgccctaagaatcctacgggcaggtaataaaaaacgaataatcgaattaatttcatgatgtgatttatttataattgtgatgatttgagagggagcgataatcatcataatggaatatatagccaaaataattcgagttgcttaaaggcggcaagggagtgagtccccaggagcatagataacgatgtgactggggtgagcaacggcccgtcagggcgaggcccatggatgggccgggtaatccgtagccaacacataagccacttgaagtaggaagggtatataaaataataggcagattaataacactaaaaaccatagaataagtatagtttttagtggcatctttaccttgaaataacgtgttgaggatgtgctattaaaaacagatcctcattgcgccgcgaatagcattaaagatacaacccggtgcggagagcgtgggtttactctaccgcttattcacgtatcacaaaccgtttttgttttatctgctgcacagcgctgatcagcgcggcaaaaaagagcgccgcggcgccgcaaagcgtggcgttgataattgccgacgcgccattgcctgacagactggcggcgagcggaccgagaatttgcccaataccatacgttagcgtcaccaggcctaacaaattaatattacccggcgcgctgagttgtcgggcaagcggcatcaccagcgaggttgtgcccataaacgtggcgccaaaaccaatactgctcagtattaacagcaacaacgagtcgctggcgagagacagcagcacgcaggcgctctggatcaacaggttcgcggtcaggcatggcaggacgccccaatgttttgccgcccacagccagccgaagcagccgggaatgatcgccaggccgaccaacgaccaaaggtgcgccgtgagtagcggagagcccgcgcttttcgccatcagcggcaaataggtagcgacaatgatgtagccgaatccggcgaaaccgtacaacagcgccagttgccaccagggcataggctgattttcgattcttgctaagggcgcaggcggcagcgcatgagcgcgggggggaatcaatattgccacgattaatagcaatataccggcgagcgccccggcccccagccatagcgaatgggccgaaagcgcataatgtaaaccgccaatgacatattcgttgcccagtgcaatcccggccccgacgccggaaaagagcgcggcgatcacaaacggatggcgggtatgatgcaacacaatcattgatccaaaaatcatcattcccgcgctcgcgacgcctgccaggaagcgcaccaacatgacgaccgcgggttgggtaaatatcgccatggccagaataagaataccggtggcgaccgccgaagccagcagcatggggcgtagacgagaggggagatgaaaaaggccaaaggaaaacagtaagcttcccgccaggtaccctgcataattggcgctggcaatccaggagagttggttaaacgttagctgcttttccgccagcattaccggcagcatgggcgtatacagaaagcggccaactcccatccccagcgtcaataccatcataccgaaaagcgccgtaaaaatgggatggcgaggtgaagcgctctgagcatgaaccatggtttttctctttgctaaagtaaggcaagaatgcctgattgttgttgcaaatgataataaaaagtaaaattaatgtttcaaatttgcaagaaaagaaagtgaagcgcaggcgaataacggattgagaagaggggcatcggtgggaaatggcattaaattaatgcctcccacgtgcggggtttggcagttaatctgaacgagaattgcgccttccccttcttagatactgagcagtgccggtatttgcgacagtaaatataacaccagaccgatagcgccgccgaccagcgtgccgttcacgcggataaactgcaaatctttaccgatattaagctcaatctgctgcgacatatcgcgcgcatcccagccttttacggtatcgctgatgtggcgcgtcaggaaggcggcgaattccggcgcgacgcggtgcgcggcctgttccagatgaccgttaagcgaagcgcgtaatgcgtcgtcggcgatcagcgtctcgccaaaccattgtccggcatgagcgatgcgctgcttcacctttgagtcttcggcgttgatatctgtttttaaccactggcgtagatccgcccagatttcgccgagataacggttaaacgcctcatcttccttcaggtaacttttaatgttttctgcccgggcagccatttccggatcatgtttaagtttatcgatcagcttatacgtcgcgcgatcgaaggcatgacgaatctgatgcgcgcggtcgtgactgatatcatccagcagagaattcaccgcgtcggagaccagttcagcgctgtgttctcccagccattcggtcggcagaatcttcgcttttaacggatgttcggtctccagccagcgtatgatctgtctggcgataaatgttcgggagctgtcacgctgtaacagggcgataagctgggcgatcagcgtatcgagtaacacctggtgacgatcgtttttggtcatgctttccagcatcagggcgctggtgccggaaagatccactttatcaatcgccttatgtaccgctcgcttgagcagccgctgaatacgggcgtcatcggttagttccagaaagccgctcataatttgcagcagatgctgcccgacccggctggcgttgtccggctggctgaaccagtttccgataagcagcgcgggttcatggcggcggattagcgcgatcagcgactgcgtatcaaggaacttctcctgcacaaattgcccaagattttcgccgattcggtctttattacggggaataatcgccgtatgtcgtgaaataaacggaatgggaatgcggcgaaacagcgccaccacggcaaaccagtccgccagcgcgccaaccatcgccgcttcggcaatagcttttgcgcccagcacccaaaaactgggcggcaggaaaagcgtggtcacaaacgtcgcggcggctatcagcaacagtgagagcgccaggcgtttggcgcgtttgagttcggcgattttattcatagggttaaggatagagccagacggcaggaacgtgcaaaaaacatcagattatcctgtgccggataagcctctatccggcagagtgtttacttctcagcggccagttctgccgcctcatgctggcgcacgcgctgtaatagtgtcgccagagtgaagaccacaatcaccccggccaccgctgccagcaggtgaaacggcagtctcccgccgtgaaaccacagccagcggccaacttcgaccgacaccgccatcaccgtcagaatcaccatgttcagcgaggccgaaaccgtcccttttggcaagttgttggaaaaaagcgtgaagcgaaacagcgtcgggaaaatcatgccaatgccgaacgcgtacaggctggtgcccagcacagaccaaagccagacgtgcggcagaagaagattaccgaggagtaatgtcgccagcccgcttaactggattggtacggcgcgccagataaaacgcggtcgggtcggatctttcaccaggcgcacaacgatcatattggccacgatcaccgcgccgaatacgggcacctgcgcccaggcgaattgcgaagtactcatcccgccagcatcgatcaggatcaccggcgacaccgccacccagctcatcatcgggatgtagctcaacgacagcgtcgccgccccggtgagaaaaatcgggttgcgaaacacattacgaaaatcgcgcagtacgctcaccgcgctgaacggcaccgcgccgcgttgcaccgtttccggcatcgccagcagcaggccgcacaacgccaacagtcccatcaccgcaataataccgaacagcaccttccagtgaacgaagtgcatcagcgcggcgccggagagcgggccgataaccggagcgaccagcacaatggaggtaataatcgccatcagcttaatggctttggtttgaccgaaggcctcctgtaccgtgacgtagccgaccgttgcgataaagcaaatgctggtgccctgcacaaaacgggcaaccagaaactgcgtcattgaggtcgtcaacagcgttgccgcgcaggcgagagtaaaaattaatgcccctgcaatcagcactggccggcggccaatcctgtcggatagcggccccagaagccattgcaacgccattccgcccgccagatagagactgaccgaggccggcgcaagactgacgtcagcattaaaatcgcgcacgacgttaatgatgccaggctgaatcagatccgtcgtcagataggcggcaaaatcgtacaaaatcagcgccatcgggaaaaataacgttgtggcgcgttgggagaaaaactgaataatccgttgcataaaaaatgcgctccatgtcggagaaccccatgatgggatagcgaaactcaataccgtcatcgtgacgtcaggcaggcgatagaaacagcggctgcggatgtactgaatttcatgtaatcaaaaacgctgccggtgaaaacacagacaggaagagacgcgttctgaatctcgtcagaacgtgtggcgattacagataacaatcagcacatcacacctcgggaaatttacgttgcacggaaaatatacacattaagtgtaattaaattttgatgttaatcaaaagagtttgtctggttaataaagataaaggcagggtgcgcaggctggtattttgcgtgctcagttccgaaaatgcatgtgcattacagataacaggatttatcttccgtcgcgcctcgcaatgctgaaaaggtacggatgagaaaggaattttcaggaggtagagtcgcagcatcctggtttggggggacggagcgccatgaaaaaatcgacgacctcaacaccgcatgatgcggtgtttaaaacctttttgcgccacccggaaaccgcccgcgattttatggagattcatctgccggtgtcgttacgccagctttgcgacctgctgggactggttgaacgaattgcttcgctgttagttactggttgcgctaatgacaggcagcttaaagcgctgtttaattatcttatgattcagcacggacatacgcctcgtttcaccacgtttattcgtgatgtggtagggcatgtcccgcacactaaggagagactgatgacgctgatagagaggatccgcgcagcggatcgcagaaaaggggaacggcaaggaagacaggttggtctggaggaagggctggaaaaagggctggaaaaaggtcagcgcgttgccgcattgcgtatcgccaaacagatgctggcggacggacttgaccgcgagactgtccagcggttcaccggccttacggctgaagagcttcaggatgttagccactaacgcggttccagtctgaatgttgcaggcccggtgcccgccgggcaacgctctctataattatcgctgataacctcacgaatataccgaactttaccgatagcgccagccatctctactacccttattgttctgagcggcatttacggctgccttaatgacgataacaaggagacatgtgatatggcttaccagacagtgaatcctgccaataatcagctcattaaagagtaccccccgcacacggacgcggatattgaagccgcgctgcaaaaagctgacgcgctctatcactccgattggtccaaaggagagattgaccaacgtctgccggtactgcataagctggctgacttgatcgacagccgtgttgaagaactggcaaaaatcgccagccaggagatgggcaagctcatcgagcagagccgtggcgaagtcaaactgtgtgcgcagatcgctcgctattatgcggataaagcgaagcagtttcttgccccggtgccttataaaaccgagtttggcgacgcgtgggtagaacatcatccgattggcgtcatcatggctgttgagccgtggaacttcccgtactatcagttgatgcgtgtgctggcgccgaacctggccgcaggtaacccggtgctggcgaaacatgccagcatcgtaccgcactgcgccgagacgtttgcccatctggtgcgtgaagccggcgcgccggaaggcgcatggaccaacctgtttatttcctccgatcaggtggcgaacatcatcgccgacccgcgcgtgcagggcgcggcgctcaccggatctgaaaaagcggggagcgccgtggcggcacaggcggcgaagcacattaaaaaatcgacgctggaactgggcgggaacgatgtgttcgtcgtgctggacgatgccgatcttgagaaagcggtgaaaattggcgtgcaggcacggctcactaatgcggggcaggtatgtacggcggcgaagcgctttatcctgcatgagaaaatcgccgatcaattcctcagccagttcaccgaggcgttcaggaaggtgaaggtgggggatcagatggacgcttctaccgaactggggccgctgtcgtcgaaagatgcgctggaaacattgaccagacaggtcgaggaagcggtgaaaaatggcgcgacgctgcacgttggtggcaagccgctggaaagcaaaggcaacttctttgagccgaccattctgacccatattacgcgtgacaacccggcgtactttgaagagttcttcggcccggtggcgcagatgtatgtggtgaaagacgatgacgaggcggtaaaactcgccaacgattcccactacggcctgggcggtgcggtgtttagtcagaatatcgaacgcgctaaacgcatggcctcccggattgaaaccgggatggtttatatcaactggctgaccgacaccgcagcggagctgccgttcggcggcgttaagcgttcgggcttcggacgcgagctatcggatctggggattaaggagtttgtgaaccagaagctggtagtggtgcgccgctaatccctgttgcccctctgaaatcgggaggggcctggctttttgcagcgaaggacgcggatcttaaatcagaacgaaataagcgaacaaaaccccctcaattgccctccttatttatccacgttgcactaaccgtgctttttatcccggtattgtttgtacagacattcatgatgcccgcattttctgttctatgcggaggccggtatggaattttacgagaaccgccccagacaaccattcattggctttgtgcagctcagacgggcgctaaaaaggtggtggctgcgtaagcgggcctgtcaggcgctgcgacgaatgagtgacgagcagttaagggatatcgggttggaaaggaaggatgtggaatagtgaatctattcaagggcaatagtaattaaaggattttatgatatattactatgcccttatgttatgcgtgctcactattttatatcatttatattaatatcattaatctttttctcaatgtatttttctggttttattttggttttttgctcaatcgcatgatatttttccttatcaatggttatagtcattttttcttttttgttaaatatgccagggatgataatcgctgctgcaattatcaataatattattattgctgcatgaattttgtgtttgggaaatgcttttaatagagtacacaggattgttatacccttatgtataagataaggaaaagatagaaataaaacaaatgggcaagcaaaatttatgacatgtttcccatagtaattattatttattgttagcgaaccaatacagaatgccatcacacaaaatagaaatattccgaagcataagaaggatataatgaaagaaccttgcataattcttttatgcaactcttgcaaaatactatttgtgatcttttccagtttagtgttatgacaaataactaccaacatcgcaaaaaaaatctcagataaagcaagcgaaaataacgtattgaaggccatgtagctcatcagcgtttcgaaaaatatactttgctgaagatagtatggtaatagagcgttgacctccataaaaaaagtacatagaaatccaagggcgacataagcaattaaaccttcatttctccaaagcgtaatgttttcttttacttttagccgcatgattttccttcactcattgatatgaattataattaaagctggcaagggttctttgccagcttattttatgcgtttacttagaacctgccatcacgtcgataaacgcctgcacctgcttttgcttacgcgccgatagcttgctcacctggcgcagcgactgcatcaactcgctttcttctggttgcggctgctgtgccgtcagcacaatacagccgttcatcaccctcacatccacctcggtaccggtggcgaaaccggcggcttccagccactggcccttcatggtgagggcgggaatgcgggtataatccggataacgactcgcataactcacggtaaggtgacggttatttgttggggagacttctggatcgcacggatctgcaatagaatggacggtagtcatgatggctattccctaaaatagtgattgtgatgagcgatatggccgtgttcccgcacggccatatcgcgctaaatacctgtacataacatcagtaaataaaagaaaagtccagctgaaaatagactgtaatgggaatgttcaggaataaactggatatatttttgatggttatgattgcggggaaataataaaaagcgcaccgggaaggtgcgcttgaaaataaaggtcaggcttttttacgcgaggtttttttaccgccgctggcggcgcgttcggccttaattttttccagcagggcggcggcgctgttttcaccgctgataagttcagggttttccgcacgccactgggcggtcagctcgccgcggaaggccttcgccaggatcgactgggtgaggctgttgacgcgggtcagggcgttgttgacctgcttttcaatggtgtcggcgtaggcgaagagttgttcgacgcggcggacgatttcgtgttgttcttggagtggtggtagtatcaatgggagtgattttatccttgccaaagccaacttcccttgagctcctgattttatttctgaattgataatatcctgaagataactacttctcagccataaagaaagaaatctattgaaaatattttcgtttaaattacatatcttggcagcattttcagttaaatttgcattattataaacatctggaattataccagcatcaccaatacatgcaccaacaatagttatataaagatctccagatgagactgtatatctagaaatacttttttgtatatattcttctaagtatagttgtccttcaggaagaacagttccattttttagctgccctgctctaatatatggaaaccctgtattctcagctattaatgattcacctttaggtaatctcttgccacctttgacatcagcaaattgaccaatctcactgattttccataaagatggaatagaaatattcaattctgttaacttgaatttattttttttatgaagttcttttgtcagttgcccgtttactgctgcaactatcactgattggcgaaaacgtttcaggatttgtgggatttgctcaagacgtgctttggtgctgtctacctgcgccagcagcgtatcgagtttttcggcgatgactttttgttcggcaagaggtgggacaggaacaccatagttctcaagaaattctttagtaacacgtttatgtccgactgaaccggacatattaagtgctccattagttaaaaaatctttagttttaactaaagcaaacaaccaatggggattaattaacccattaatagaccgaagaacataatattcagtgctaccggcaccatagccgttagggaattctttgattacaacagcttttccattttcgaagcatggcgtgattttggcaaaaataacatcatcgttctgaaattgagtaaatcctttttttacttcactccactttttggtttcaaagttacatttacctaaataggttgttggaacaccggccatcggcataaatccaacatctaaatcatcatcaagtttaagtttgggattgaggttgcacatttcattgattgtgcttgtagcccacccctccggcaatttccccccactcatgccttcacctcgccaaacgcttcattcagcaactgacgctgagcatccgcttcatcgcccgcgcccagctcgcgcatcagcgcatccagttcgcccagcgcctgtaccagctcgcccatcgcttctgccgccagcacgtccggctccggcagactgtcggcgtcgatgctgtctttatccttcagccaggagatatccagcgaatcggattttgcgctgcggatccactcgcggctgaacttgcgccagcggctggtggcctggcgctggtcagtgttcttgttctcttcgctgtcggcgacttcgctctcttcggcgttaaagctccactccccttcttcacgcggacttaagccgtgtggatcttcgccgtagacagtttcaaacggctgcagatgctgctcggtaaacggcgtgcgcttgccgaagctcggcatattggtccgcaggtcatacacccacacgtcatcggtgcagtttttatcctgatgcggattggtgaccgtgcctttggtaaagaacagcacgttggttttgacgccctgggcgtaaaagataccggtcggcagacgcaggatggtgtgcagatggcatttgtccatcaggtcgcgacgaatatcggtgcccttaccgccttcaaacagcacgttatccggcaccaccaccgccgcgcggccgccggggtgcagggtttcaataatatgctgcataaagcacagctgtttgttgctggtcgggtgcacgaaggtacgggtaatgttggtgcccgcggcgctgccaaacggcgggttggtggcgacgatatgtgccttcggcaggttttcaccgtcgctgcccagcgtgttgcccagacggatagcgccgccgtggtcgaggttgccttcaatatcgtgcagcagacagttcatcagcgccagacggcgggtgccgggcaccagttcgaggccgataaacgcgcggtggatctggaaatcctgagtgtcgccatcaaggtcatccagatcgttagtctgtgatttcacgtaacggtcagcttcaatcaaaaagcccgccgtacccgccgccgggtcctgcaccacttcacgcggctgcggtttcagcagatggataatggttttgatcagcgggcgtggggtgaagtactggcccgcgccagatttggtttcgttggcgttcttctgcagcagcccttcgtacatatcgccgaagtcgtcgcgggatttcccgtggttgccattgtaccagtccagcgcatccatatagctgaccagctcagtcagctgtttgggttgctcaatggtggtgctgacattatggaataccgcctgcaccagctttttctcatctgagcctaactgaaccagcaggttgcggtagaactgcatctgatcctggccaatacgcgatttcaggtcatcccagcggtagccttccggcaggtagtccgcttcctggccggtctctttgcacattttcaaaaacagcagcgaggcgagttcattgacgtagttttgataggagacgccgccgtcacgcaggttgtcgcacagtttccacagcttggcgaccagatcgttattgttcattgaagatcctatttgacatggcgaccaccattgtgggtcgcaaaagtgattgagcgtttcagatgcctgatggcgcttcgcttatcaggcctacagggttaggtgtaggccggataaggcatcgccgccatccggcgaaaacggggatgataccctcttaagccagttcgtcccagatgtaatcgctgaacttatccagcacgctgtcgaggttgtcatcaaaggtgcgctgtaacattggcttaccgcctcgacggtggaaattgccggttttgaagacgtcgtcgtcgagcaccactttctctttcagcgcctgcgctaaacggtcgagccagtttatctgctcgtcgctccagtcgttctcggccttgatacgcgccagcgcgtgatcgacacgctcgtcaaacggtttgagcgcatcgcccaccgccgcgcggcggatatggccgatcaggcgggcggcaatatcttcgttgcgcgtcgctttccacgcgctgcgcagggacgactcttcaaaatgctggcggtcaaaccactcctgcaattccaccagccctttacgggtgaggtcacgcgggcgattgatcaccgcctgcaacgcgggctgggcgttcggggcgtgctgcaccagcgcatcgaacgcttcgaggaaatcctgcggtgtgtcgtagtcgccgtacagcgatttgacgcttaccacctcatcgtcaatatcgaggaaaatgggggcctcacgcagggcgttgatatcggttttcagcctttcgagacgggcgataaagccgggaagcttattgaaaatctcggcgctccagtgcggccctttttcccgcaggcgcgaagccagaccaccaaagttaacgcccgcggcatccaggcacagttcgtccagacggcggacctgcttatctaccgcttcgctgcgatcgcggttatagatggcaagaccgataatccgctgcagcttagcgaccagctgttcatggctgtgttcggcaaaactgcggccatccgcttcgatggttttgtaggtttctgagtcggtaatttcgttgaccagcgtttgcagctccacctgcggacgcacaaccaccgggcgcatggtatcgacgctttccagcgagctgtagatatccacgcagtcgaaaatcttaaagctggttttccctactgacggacacagacgcgtggcgcggcccttcatctgctcgtagagaatgcggcttttgactttgcgcaggaacacaatattacagatagacgggatatccacgccggtggtcagcaggtcgacggtgactacgatattgggcagccgctctttgttaaagcggacgatcatgctttgcactttcttcgcgtctttatcggcatcaccggtgatcttgatgatcgcgtcgtgctcaagctgcggatactttttcttaaacgcgctacgcagctcgtcaaccaccatatcggcatgggcgttggtgacgcagaacaccagcgttttttgctgcccggtgggatccaggtatttggtgagctcgccgcataccgcgcggttaaacgccgggatcaccaggccacggttaaaatcggcgacctcaaaatcctgatcgtcggccagcgtgtcgttgatcagctcgccctgtgggttcaggcgttccacctgttcaccctcggaaagatagaccccgtcctgtgcgttgcgggtgacgatctgaatagggggatcctgatcgatcaggtaaccgtcgattaccgccgtacggtaggtgtagcggtaaaccggctcgccgaaaatatccaccgtgtgcagcgctggcgtggcggtcagggcgatttttaccgcgtcgaaatgatcgagaatgcgacggtaggcggaaacgtaatccagctggctacggaactgcagctcgccttcggtctgctctttatcgagaatgtagccacggtgcgcttcatcgaccacgatacagtcgtagcggccaaccggcatcggttcatcggattgcagcgtgcgcttgaccagtgactgcaccgtggcgacgtgaattttggtgctgtcttccgggaatttgtcggttaaccctttgatatcaaaaatgctgttaaaggtgtcgccgttaatgcgcgtgtcttcaaacgcccccagcgcctgttcgccgagcgagcgacggtcaaccaggaacagcacgcgtttgaaacgctgcgactggatcaggcggaacattaaagcaatggcggtacgggttttaccggtaccggtcgccattgccagcaggatgtgttgctgaccgtttacgatagcctgttccaccgcgcggacggcatcttcctggtaatagcgcaggccgagttcgctcattccgggattttcggcaaaccactgattttgtttctgcggatcgctgcccagcatatccagcagctcttccgggcgatgccattccggcagcgctttcgacatgttggtggtgtggcggacgtcgcgataccagataccgctcttggtcttcatcgccgcgcggtattcgcgcccgttggtggagtagcagaaggggattttaaagcgctgtttaccgctggtgtcctgccagctgatttcatactccggcacggcgtcatgcacttcgtcgggagcgtagtgctccagcagcgtgtcgcgtaaaaatccgttatcgaagtatttactgtagcggtaagactcgttgagcttgctggagacatcggtatttttgcgtttcgcttcaacgacggcgatgggcttcaggccaatgaacaatacgtaatcggcaaagcctgtttttcccgtttcatctgtacctgttggccattcggcaatcgctttattgacgccgggttccgggcgagcgcctttggcaaagcgtaacgttttgctatctgcctgccagcccgctttacgcaactgggcgtcgatcaggaagcgactctcttcttcattgagttccaacgtgcgtttgacagcctggtcggtgatttctttatgataggccttacgttcctgttcggtttgcttcgccagttcggcatcttttgctgcaagctgtgcctccagcgcggccagacgcgctttggtctgggcttcggtttcctgctgtttgccctcaaggatggcaatgtagccgttgagcgcaaccagtctttgctgctgagcttccagttcggcctggctttgtactttctcttgcgcctgacgttccagctgttgtttcagcgtcagcacttcctggtgataaagattctcgccgtgttctggcagaacaaacatcggcaccgggaaatcgtaatctttggtcaccagccggtagtaccagacgctgaggcggaacccgagccgcaggcacatctgggcatcgtccagatcgttatgaaattcgtggacggccaggttaccgatacggcgcagcttatggaaaacagaaaggatgctgtcatcaataaacgcaatcttgcccagttcgcgcagcaggtcatgctggttttcgcaggccggtatatccagcaactggccgagatgtttcgcggtggcttcgccaaacatgcgcatttttatcagagtggtattaggatcgtccggatagttgttttccgccgcgcaggcgatggcgtaaatgaagtcgttgacgcctttgagaaagtcgaagttagatttgttcatttttatctatccggttcctgagcgggaagacgttattaccctgtgccgtaaagggaaaataacagacccatggtagacttcatattgtgtgtgatcaacgaacaatcagagagtaactgcttctttcctaatgttttcctgaagagtatcgttctccggcggggtatctaatctatatcaatagcagggatggatttatggctgttccaacatatgacaaatttattgaaccagtgttgcgttttctggccactcgacccgagggcgctttggtcagagaagtgcgtgaagctgcagccgaaatgcttgggttagatgagcagcagcgtgcagaggtgattaccagtggacaactgacgtaccagaaccgcaccggttgggcgcacgatcgtctcaaacgcgccgggttatcgcagagcctatcccggggaaaatggtgtttaacaccagcgggaatgagctgggttgcctcgcatccgcagccgatgaccgagctggaagtgagtcattttgcttgtgattttaacggcgtaaagctcagtaagctggcagatgcggtggcgttagatccacagccagaatcgattgaggatgatgagcttgccagaagcagcccggacgatcgcctggagcaagcgctcaatgagattcgtgaatctgttgccgaagaattgctggagaacctgcttcaggtttcgccggcgcgttttgaagtgattgtgttagatgtgttgcaccgcctgggatatggcggccatcgcggtgatttgcagcgcgtagggggaaccggcgatggcggcattgacggtattatctctctcgataagctcgggctggaaaaagtctacgttcaggccaaacgctggaaaggcaccgtcgggagcgctgaagtcaggggcttttatggcgcattgcctgagcaaaaagtgaaacgtggcgtctttattaccacctcaggttttacggcgcatgccagagactatgctaacaaagttgaaggtctggtgctggtggatggcgacaggctggtgcatctgatgattgataatgatattggcgtatcctcacgtttactcaagttgccaaagctcgatatggattactttgagtagtggtaacgctggaacctgattgcgggtaattgagatggaccacgttgtgggcacctgtgtttcctctcgcccagaaatcacgtgactttctatggctgcgtatcagcctaaacccatgccggatagcggctgcgccttctgcggcctactcttctggtcaatttccttttatctcgaatacacaaattgtgaagctatttccaacaatccaggtataatcgtaagataattgtatatacatttttgtatgtacaattagggaaaacacatgccgatggagtttgaatgggatgcgaacaaggctaaaagcaacctgaggaagcacggtgtccgttttgaggatgcggtactggtgtttgacgatccccgacacctgtcacgtcaggagcgttatgagaatggagaatatcgttggcagaccctcggccttgttcatggcattgtggtcattctggttgctcatagcgttcggttcgaaagtggttttgaagttatccgtatcatcagcgcccgcaaggcagacagaaaagagaggaatcgttatgagcatggttaaacataaacgcggcaacgcatccgcgctgagtgctcagcatgaggctgaactgaaggcgctggcgaaaaaatcagatgatgagattgattacagcgacattcccgcttcggaggatgggcagtggtctgaagcagtgcgtggtaagttttttcgcccgttaaaaactcaggcctcggtgcgtattgacgccgatgtgatggagtggctgaaacggccaggaaaaggctaccagacgcggctcaatgccattctgcgcgaggcgatgctgcgcgagcaaaataagaaatagcccgaagatgccggatggcggctgcgccttatccggcctacaaattcccgccaggccagataagcgcttaatggttacttccttaaccccacaaatgccgctctgatctcgtcttccggcaactggatcccgataaataccagcgtgctgtgcggcgtttcgtcgccccacggtctgtcccagtcggcgctgtagaggcgctgcacgccctggaacagcaggcggttgggttcgccgtcgatccacagcatccctttgtaacgcagcagtttatccgctgattccagcagcaggttttccatcacccgcgacacctcgctgatatccaccgggtaatccagttccaccacaattgacgatacatcgttctgtttatcggcaataaagtggaaacgcggttggcttgccagcacgttctcttccagcataaagccgctggtattaaacaactgactcaggtcaatatcgccgtgtaccacggtgtaaaccggggcgcgggcgttgatacgcgccagccgctcgcgcagtttctcgctgtcgcctgccacgtcggttttggtcaacagaatgcggtcggcgtagcctatctgcgactgggctatggtgaactgattcatctgctcgttagcgtgcaccgcgtcgaccagcgcaatcacgccgtctaacaggtagcgttcgcataatacgtcatgggagaaaaaggtctgaataatcgggccggggtcagccatgccggtgcattcaatcaccaggcggtcgaaagcaatatcgccgcggtcgcggctgtcgagcaggtctaatagcgcatcttccagctcgttggagcgggtacagcagatgcagccgttagtcagggttttgatctgtgtggcgcgatcgccaatcagttgatcgtcaacggagacttcgccaaattcgttttcgataacggcgattttaaaaccatgttgttcgttgaggatatggcgtagtagggtggttttgccggcaccaagaaaaccggtaagtagggtaactgcaatcggggtcatagtctctccattaacaacagcgcataccgcctttgccatcgccgccgtaacgtgcttgctgacgttcgcggaagaactcttcataggtcatgtacggcttgtcgggatggttggttttcatgtgctcgacatagttgtcgtagtccggaataccaatcaacatttttgccgcctggccgagatatttttttgcctgacctaaagtatcaaacattctgccgtcctgttaatgaataaagccggatggcggcttgcgccttatccggcctacactagccggggtcgctgtgcgctacccggcatcagttttagtggtgtgaagagatcttcacgccgccttccggcacaggcacatacggggtttctttgtcggtacgtttatcgctgttgcgtaccttcatccaggtggtgaaaccgtagaagataatactgtacaccaccaccaggaacagaatactcaaaccagcgttagtgtagttgttcaccacgatatggttcatgttggcaatctgctgctcggtcaggttggcgccgttggcaatcttctctttatacaggtttgccatgtagaagaaaccttccatctgtgggttggcgctgaacagtttcaggcccagcgcccaggtggtgcagatcagcagccataccgccggaattaccgtcacccagatgtatttggtgcgctgcattttgatcagtaccacggtgctcaacaccagcgccacggcggccagcatctggttagagataccgaacaacggccacaggctcttcacgccgcccagcgggtcgaccacgccctgatacagcagatagccccacaaaccgacgcagcctgcggtaccgatgatacccgcgaccagagaatcggtttttttcaggaacgggacgaagttacccagcaaatcctgcaacataaagcggccggaacgggtacccgcatccagcgcggtcaggataaacagcgcttcgaacagaataccgaagtgataccagaagcccatatccgccatcggcaggactttgtggaacacatgcgcgatacctactgccagcgttggcgcgccgcctgcgcggttcaatactgacggttcaccgatatctttcgcagtttgcaggatttgttccggggaaatcacaaagccccaggagctgacggtcgccgctgcatgtgcggtaacgtctttcaactgcgccataatcagcggcgcgttctcgccgcccatctcgtgcaggtttggcatggtaatgcccagacctgccggcggggtgttcatcgcgaagtagagacccggttcaatgatcgaggccgccaccagcgccatcaccgcaacaaaggactccatcagcatcgcgccgtagccgataaaacgcgcatcggtctcacaggccagcagtttcggcgtggtgccggaggagatgagcgcgtggaagccagagacggcgccacaggcgatggtgatgaacaggaacgggaacagagcgcctttccacagcgggccggtaccgtcgacatactgcgtcaatgccggcatttttagttccgggttgaggatcacaatccccagcgccagaccgacgatcacgccgattttcaggaaggtagcgagatagtcgcgcggggcaaggatcagccataccggcagcagcgcggaaacaaaggcgtagccgatcagcgcgaaggtaatggtggtgtctttaaaggtcagcgccgggccccagtaagggtcgtgggcaatcacgccgccgaagtaaatagacgccaccagcagcacgataccaataacggagacttcgcctacgcgtcccggacgcaggaagcgcatgtagatgcccataaacagcgcaatcggcaccgtggagcagacggtgaagacgccccacgggctttcggccagcgctttaaccacgattaatgccagcaccgcgaggatgatgatcatgattaagaagcagccgaacagcgcgatggtgcctggaacggtacccatctcttctttgatcatctcgccaagagaggcgccgttacggcgggaagagatgaacagcaccataaagtcctgcactgcgcccgcgagcaccacgcccgccagtaaccacagtgtccccggcagatagcccatctgcgcggccaataccggcccgaccagcggacctgcgccagcgatggcggcgaagtggtgaccaaacagcacgtagcggttagtcggcacgtagttcaggccgtcgttattgataaccgccggcgtcgcgcgcgtcgggtcgagtttcatgaccttctgggcgatgtacaggctgtagtagcggtaagccaccagatagacggaaacggaagcgaccacgatccacagggcgctcacgtgttcaccccgacgtagggcaacgaccgagaggcagaaagcaccgatgattccgagaatcacccagggtatgtgcttgaatatctttttcgtatccatagtaaaacctggttgtaagtttaattatcagccgaagctgggtggacattgagttcgtgtttgaggaggtagattgactgctatgctgagaggatcttgccagatcatcgcgcgcgtaaagttaggtaaatcagtgagtggttgtatggcggtttaagcggtcggacgtaccggtaagcggtttcgcggaggagggcgtgggctattttatgtgattgagatcacgatataaaatgggacgatccttgttgcgcggggcgtcataacgacttcactgagctaatcgtgatattaatggcgcgcatcccataaagttttccctttccaggccgaaaattctgtatctgtctagcggaaagagaaaacatgttaaagcgaattaaaattgttaccagcttactgctggtattggcgctatttggccttttacaactgacatccggcgggctgttcttcaactcgctgaagaatgacaaagaaaacttcaccgtattgcaaactattcgtcagcagcagtctgccctgaatgcaacctgggtggagctgttgcaaacgcgtaataccctgaatcgcgcgggtatccgctggatgatggaccagagcaatattggcagcggcgcaactgtcgctgaactgatgcagggggcgaccaatacgctgaagctgaccgaaaaaaactgggagcagtatgaggcgttaccgcgcgatccacgtcagagtgaagcggctttccttgagatcaaacgaacctatgatatctaccacggcgcgttggcggagcttattcagcttcttggcgcgggtaagattaacgagttttttgatcaaccgactcaaagctatcaggacgcttttgagaagcagtacatggcctatatgcagcaaaacgatcgtctgtacgatattgctgttgaggataacaacagttcctacaaccaggcgatgtgggtactggtcagtgtgctgattgccgttctggtggtcattatcgccgtctggttcggcatcaaactgtcgcttatcgccccgatgaatcgtctgattgaaagcattcgtcatatcgccagcggcgatctggtgaagcgtatcgacgtggaaggctccaacgaaatggggcagttggctgaaaacctgcgtcatatgcaaagtgaactgatgcgtaccgtgggcgatgtacgtaacggcgcgaatgcgatctatagcggcgccagcgagattgcgatgggcaacaacgatctctcttcccgtactgagcagcaggcagcgtctctggaagagaccgccgccagtatggaacaactgaccgccaccgtgaaacagaacgccgaaaacgcccgtcaggccagtcacctggcgctgagtgcgtcagagacagcgcaaaaaggcggcaaagtggtggataacgtcgtacaaacaatgcgcgatatcgcctccagttcgcagaaaatcgccgatattatcagcgtaatcgacggtattgctttccagaccaatattctggcgctgaatgcggcggtagaagcggcgcgcgcaggcgagcagggacgcgggttcgcagtggtggccggtgaagtccgtaatctggcccagcgtagcgcgcaggcggcacgggagatcaagagtctgattgaggattccgtgagccgtgttgatgtaggttcgacgctggtcgaaagcgccggtgaaaccatggatgagatcgtcaatgcagtgacccgcgtgaccgatatcatgggcgagattgcctcggcgtctgacgagcaaagccgtggtatcgaccaggtgggcctggcggtagcggagatggatcgcgtaacgcagcagaacgcctcgctggtggaagagtccgccgccgcggctgcggcgctggaagagcaagccagccgtctgacccaggccgtcgcggtgttccgtattcaccagcaacagcagcgtgcgcgtgaagtggctgcggtaaaaaccccggcagccgtgtcgtcaccaaaggccgcagtggccgacggcagcgataattgggaaacattttaagggcgtagtggtgaacagtcggcctacagacgaccgtaggccggatgagatgttcacacttttgcctgatggcgtagcgcttaccaggcctggcagtccgcgcaggccgattttaaaccagcatcaggcgcatggtgcagcgtgattcatacgccaggccgtgcgccgcttcctcctctcttttctgatatcgcgcgctaatccaacgttgagtgaaggtgtgcggtgatccacaaaaaatgaataaagcgagagaacgcacggcaggagagccttgtttcgcggcatcataattgctgatgtgataatcgtgagaggatacgatgcgcaaagatgccctgcttgctttcctgatgaaccaaacggatttttttgatccggaaaatgtcagtgaggtgtttaccgcgcgctatctggcgcagcgttttaatatgcagcgcaataccgccagccattatctgaaccaactggtggcgcagggcgtgctctgcaaaatcaatacccgtcccgtctatttcctgcataagcaggcatttagccaacagttttttaccctttcgcgtaatgaatacgccagcgtcgcggagctgttagcgcacggggaacaggagtgcgcgccggacgatcacttttccctgttgattggccataacgaaagcctgaagcgcccgattgagcaactgaaaaccgcgctgttttatcccgacggcggactgccgctactgatgaccggcgaaagcggcaccgggaaaagttatctggcgcagctcatgcacgaatatgccatcgcccaggcgcttctgtcgccggatgcgccatttatcagttttaattgcgcccagtatgcgagcaatcccgaactgctggcggcgaatctttttggctatgtgaagggcgcgtttaccggcgcgcagagcgacagaccgggcgcgttcgaggcggctgacggcggcatgttatttctggatgaagtccaccggctgagcgccgaagggcaggagaagctctttacctggctcgatcgtggtgaaatttatcgggtaggcgacaccgcgcaggggcatccggtttcggtacgtctggtatttgcgacgaccgaagagatacacagtacctttctgacgacatttttgcgacgcatcccgattcaggtcaacctgccggatctccagcaccgtagccgccaggaaaaagaggcgctgatcttactgtttttctggacggaggcgaaaaaactttcggccacgcttatcctcaaaccgcgtttgttgcagatcctcaatcagtatgtttatcgcggcaacgtcggcgagctgaaaaatgtggtgaagtatgcggtggcgacggcatgggcgaaaaagcctgggcaggaaaccgttaccgtgtcgctgcacgatctgccggatgccatgctgtcggcattgccgtcactgaatgaaccgctggcggacgacacgccggtgagcatctcgcccgacacgaaccttacctggctgctgcgcgcccgcgacgagatgcagggcatgatccatgatacgcagtgtcatgtgctggcgctgtacgagctggtacgtagcgggaaagaggggtgggagacggtacaaaaaagaatgggcgatgaaattgagaccctcttcgatcgcctgatttttaccggcgacgataatgtgcactcacagcggttgctgttaattacaagccaggtgcgggaagagttttatcgtctggagaagcgcttcaatatgcagcttaacggcaactgtatttacgcgcttagccactatttaatccatcgtaccgcactggcgccttctcgtctcaacagcgagcagatccgccaactggacgccttcctcgcccagaaatatccgctgctgtacagcttctgtttacaaattctggagacgctgggccagaagctggatctggagccgagacgcattgatatgctgctgctggcgctttggctgcataaacagggggctaacaaccaaaaacaggtgacgcatgcggtgattctggcgcacggctatgccaccgccagcagtatcgccaacgtcgccaaccggttactgaaaaatacgatttttgaatcgttcgatatgccgctggacgtcacgccggaggcgatagcgcagcaggtgatgcgctatctggaagagcatccgctcgcctccggcctgatgattctggtggatatgggatcgctcaaggccattcatcgtcattttgatcgcgcgctttccacgccggtgacgattatcaacaacgtctcgaccagcatggccctgtatgtaggggagcgtattttacaggggcattttattgaagagatcgctcgcgatatcgcccgggatgtgccggtcgagtatcagctctactggccgaaaagcaacaaaccgcgcgccatactgaccacctgcgcgaccggtatcggtgtggcgacgaatctttgcgcattactgagcgccagtattccgcaggcgctggagattgacgtcgtcgcctgcgattatgcgatgctggcgagcaataaaacccaggagccggtatttatgcgctacgacgtactggcgatagtcggcacgctggacccgcacatcgccagcgtgccgtggatttcgctcgactcgctgatctccggcgaggggaatcactatctgatgcggctgtttggttcgctgaccacgccggagcaggtggcggagatcaacaacctgctgctgaaaaacttctcgctccgacgagtgatcgaatccgtcaccatcctcgacaccagcaaagtcatcaaccacgttgagcagtttctgctgcgctatgagcatctggcgggcgttaccgtctcgaatgaaagaaaggtggcgctctatgtgcatattagttgcctgattgagcgtctgatccgccatgcgggcattactgcctggagtgggcaacagtgtccggaacaggaactgaatcggctacgggaagcgtttagtgtcattgagagtaactacagtgtcaaaatccccaccgccgagcttggctatattcataatatcctgaccttcgaaacagaacttatcgagcaagatcaacagttttaactatttccctctgttaacccgcatcttttttcggcgcgccactttttctggcacgccgcttgctctcttttatcacagtggaatgtgttttagaggtcaggatgaagagacattatattttcgccagccacggcacgctggccagcggagttttaaactccgtggagctgattttaggcaaacggtcaaatgtctggacgctgtgcgcttacgttgaagagagcgtggatttaagccagcaggtagatacgctaattgcccggatcccgccggaagatgaaattattgcgctgaccgatatttttgccggcagcgtgaataacgaatttgtccgttatttatcacgggaaaattttcatctgctggcagggattaacctgccgctggttatcgatctctttatgtcggaaaacgatggcaataccacgcataccataatgacggcgttagcggattcaaaagaaaatattcagtactgcaatcaaactatcaccagcgccatgcaaagcgataaagatttttaaggggaggaagcgtcatgattgtttttttacgggtggatcatcgtttattacatggacaggtcgccttttcctggacgcagtacgttggcgcagactgtattttaattgccaacgacagcgtacctaatgatgacctgcgtaaaaccaccattaagatggcgaagccgcccgcggtgaagctggttattaaaaatattgccgattcaattgaagcgataaaaagcggcgttaccgataaatataaactttttattgttgttgaatccgtggcggatgcgtaccggctggcgcgcgaattacccgacattaaaagtattaatttaggcggcacgaaggtacgtgaagggagccagaatattgctaaagccatcaatctgttagcggatgaaatgactcaacttcgggagctggcggctggcggagtagagatagaaattcggctggtgcctaacgatcgtaaacaactttttgcctgagcggataccctcctgaggacatattatggtagaggcgcttttacttggactggtggcgtttatcgcccagtctgaatatgcattagggacgtcgctgatttccagacctatcgtgaccggacttttaaccggactggtgctgggcgacatggaaaccggaattgtgatgggcgcgacgctggagttggcgtttatcggttccttttcggtgggcgcgtcgctgcccccggatgtggtcactggcggtattttaggtgtggcctttgcgattaattccggcgctggggcggaaaccgcgctgttattaggtttgcctatcgcgacactggcgttaattgtgaaaaatatctataacggaatgtttattccgttgctctgtcataaagccgatgcttacgctgaggtgggggatacccggggcattgagcgtatgcatttaatctccggcattgggctgtcgctgatgctggggattatcgtcacggtctcttatttagcgggcgtgaatatggttaaaggttttctggatgccattccagaatttattaaacatggattaagcgttgccaccggtattattcccgcgctgggttttgccatgctggcgcgcttattaattaataaaaaggtcgccccctattttttcctcggttttgttttaatggcgtatttaaaaattccggtgacgggtattgcgattctcggcgcgatcgtcgccgtcgtgatggtcaatatgccgaaatttgcggcctcgcaaccggcacctgcgcaaggagcgtctcatgacgatgaagatgatttctgataaagaccgccagcaggcggaaaccactggtctggtcaccgcgcgtgatttacgccgcgtcttctggcggtcattccagatggagttttcctggaactatgaacgacaaatgaacctggcgttcgtctatacgctcattccggtattaaagaaactgtatagccgaaaagaagatcttgccgaagcgctaaaacgccatctggctttctttaataccacgccgcacattgtgacgttgatcctcggtattaccgtggcgatggaggagaaaaatagccagcagaaagagatggacgccagttctatcgataacgtcaaagcgtcgttaatggggccgctggcgggtattggcgactcttttttctggggaacattgcgtcttatcgccactggcatcggtaccagtctggcgctgaaaggcaatattctggggccgattttatttctgctggtgtttaacgtaccgcatattctggcccgctggttctttacccgctggggctatgtgctgggaaccggcgtactgcaacgcattcagcaaagcggaatgatggaaagcctaacctatggcgcctcgattatcggtctgatggtggttggcgcgatgacggcctccatgattgatatcaccattcccattacgtttggtacgggagaagcgaaaacccatgttcaggacattattaacgacatcatgccttgtctgctgccgttaattagcttcgccattgtgtactggctgttagggaaaaaagtgaaaccgttaaccatcattggcggtattgcgctggtgggaattttcggttcctggatagggttattttaagagggatacacaatgtcaccaaccatgctgacctatattaacgaagagtctgacgtcctggcgaatattattcgccgccatcgccagtctctggaagaagtatcgcggttcgccagccaaaaaacgttacgacgaatcctgatattagccaccggatcgtcattgaatgccgccttttgcgcccgttatttctttgagcgctgcggtatctctatcgatattaaagagccgtacacctttagccagtatgagaatagcgatccgcaagccgatatggttattgctatttcccagagcgggaaaagcgcttctaccctggaggcgatgcgtaaagttcaggcgcagggacgtccggtattcgctctgaccgccgatccgcaaagccctcttggcaaggccagtgattatccactggatattctgaccgggattgagtccgtcggctttgttacccgtggatttagcgcgacggtattgaatctgttgcttatcgcgttgttaattgcccgtcagcagcagcgactgacggaatcgcaggtcgaggagtatgtggcgcagcttcaacgtatcgcggcaaccctgccgttggttatcgtgcgtacggaagcgtttattcaccagcaccaggccgttttacgaaacgggacgcgttttgtggcgacaggctacggcgcgctggttggggtggcaaaagagttggaaactaaatttaccgagacggtgcgtgttccctcaagcgggtttgagctggaagcctatatgcacggcccgtatctggaagccaatgcggaacacgtgatgttcttctttgaggaccggcccgacgcgcgctccagggcgctacgggagtatatgacgcctgcggtcgccaaaacctttactctcacgctggcgaaggcggcgcaggatgaccagacgcttgcgctggatgtagcggttgatcaccatttctcgccattactgttgattgtgccggtacaactcatggcgtttcatatcgcctcactgaaaggcatcgacctttcggtacgcatttttgacgatttcgatcgcgttttaaaaagtaaaatctgaacaatcaggagaaaaatatgttgggttttaatcaggacgagtacctgacgagtgctcgtgagatcatcgctgcgcgccagaaggcagaacaggttgctgacgagatttatcaggccgggttcagttctttatttttcgcctctgttggcggttcactggcgccaatgatggcaattaatgaatttgccaaagaattaacaacgttgccggtttatgttgagcaggcggcagaattaattcataaaggaaataagcggctgaataaagactctgtggttattacgctgtctaaatccggcgataccaaagaatcggtggcgatcgccgagtggtgtaaagcgcagggaatacgcgtagtcgctattaccaaaaatgcggactctccgctggcgcaggcggcgacatggcatattccgatgcgtcacaaaaatggcgtggaatatgaatatatgctgctgtactggctgtttttccgcgtgctgtcgcgcaataacgaattcaccagttacgatcgcttcgccagccaactggaaattctgccggcgaatctgctgaaagcgaaacaaaaatttgatccgcaggcggacgctatcgccagccgttatcataacagcgattatatgatgtgggtcggcggcgcggagatgtggggcgaggtctatctgttctccatgtgtatcctggaagagatgcagtggaagcgcacgcgccccgtcagctctgcggaatttttccacggcgctctggagctgctggaaaaagacgttccgctcattctggtgaaaggggaagggaaatgccgcgcgctggatgaacgcgttgagcgttttgccagtaaaattaccgataacctggtggtgattgatccgaaagcgtatgcgctggacggtattgatgatgagttccgctggatcatggcgccgtgtgttgtttcgacattgttagttgaccgactggcggcgcactttgagaaatataccggccacagtctggatattcgtcgttactaccgtcagttcgattattaacagaaaggggcgtgtagcatatacagtgcctgatggcgcttcgcttatcaggcctgtgcgccagtttatggataaagatgatgtgtaggccgggtaaggcgcagccgccacccggcatatatgacattctcttttaactttcaacattcaccactttgatctccaccatgccaatccccaatttgcgcggcgaatggcccaaaatattaccttcgttggtggagacgggagcgggcggcgcaatgactaaggtattcgcgtccgtcgggttgttgaaatgcagcgtgatagtggacacatcgtgacccagcaccagcgtctgttcttcgttgcctacgcgtaccggaatcggtcgattcgcgttgtcgccgaaggctttggcggtgatcaccagatcaaactttttcggcagcggcgctttatattcgattttaacctcatcgcccaactgcgcatttgaccagcgcccccaggactccggccgggaaatgccgctaaactgcttcacctcctccggggcgcccgccacgttaaagataaagctatcggctttataacgaatatcgttatcgacaatctttaaggtatcgacgttgcctttgtagcgctccatatcgatcatcgtgtctttaaacgccgtcttaccctgccactgcgctttatcaacatgctgtacggtttgctgcccgccaagctgcccctgcgagacgcaccagtcggtagagagcgccagcgccggcgcccatagctgcgccattttgtagcagcgatcgatccaaacgaaattatcgcgcggggcgaagtcggccaactggaaccgtagcggagcggagtattcactttccggtaacggctcgacgcgcttatccgatacgcgcagtagtaacggcaggcggaagtggctcccggaaaacgcgatcatgtttttgtcccgatcgacggtaaaatcttttatctctttcgggaaattccacaggcgaatgatatccggcttcatcgccagcactttctcttttacattcaggaacacttccgacagcgactgcccggaaaggctgctacgtcccagaccgataaaattatcgccgccgagaatatccagcaccgttgcgccgttgtccatcgtgttgcgtttgaccgccagagtctcctgctgtggtttatcgccgcgcagaatgaaaaacagattgttgcgatcttgcttattcaggtatttccaggccgtattgttcatcgccagatggtcggaagagacgacgataacggtatctttaaaccacggcgacgctttgattttgttgataaactcggcgatgttttcctggctgcaacttacggcgctaaaggactggttgggcttgccgtcgtaatcgtagcgtttgcggttgcaggtgcgtgagataaacccgtccgggtggtgagtatctacggtcagcgtaaacagcgaaaaacgctggcctgagcgggaaagcgcttcaaatttcttccatgcctcatcaagcaccgtatcgtcgtagaagccccagtcgttacgataagacgggtccgccaccaccgtttttagctcttcagcgccgtacagatgatcaaatccgtgtgatttcaggaacacgtctttcccggcaaaacgcaggttagcgccctgcacgaaatagttctggtagccggagtttttcagaatatcgccgaggcagatattctgcgggaagaagctagaaaccgacgcggacgcattgccctcaaacggcgcaaacagcggaataccgcactgggaagccaccatcccggcgatggtgtaatccgttcccggcagttgcatggtatggctgaaatccagcccctcatttttcagcgcgcccaactctggcgtgagattggggaacgcgtcattatcaaaataggtccgttccaggctctcgccgtagatatagaccagattgagcttcggattaggaatggtttttgctggttctttataataaacggcaaaatccggatcgccatcgcgcatttgtgattttaccagttcggtaatctggcgaaacgccgggctggcgtcgaccgaacctaacgccagcagtaacgccagcaggctgtaaccgacatgatgaggatggtgacggcggcggcgtagtacccatcccagcgcgccgaataccgccactaacgccagggcaatgccgattcccggcagaatatatttgccgactcccgctcccgtcagactattcgtgagcgtataaagcactgcgtcgttgatcccgtcgccggtaaaatagtcgctggcatacagggtaatattcagaatgacaaaaagtcccagcaccgtgagagtggcggcaaaccaccaggtgttacggcccgccttccaggcatatatcagcacagaggcgagaaacagagcgacagagagcaactcggacaactgacgatcctcaataaaccaggcttatcgctggcaggaaaaaatttctaacaatgtaatagcgatgtcacattgctgcaattctaataactttacacggcgctgttatttagaatgagtttagaaagttggttttttgatcggcatcacttcctgccatagcggttaataacaggaaaagacgaagagaaaaatcgggttaatgccgtgttggcgggtaaagggccaaaacacggcgtttatcagggcgtcccggcgtggcgcacggtcagaaaaacgcagtcaggagaggaaattcagcccttgctgcaacaccagatcgcaagctttggttttcaccttttccgccagcggcgtactgccgatattattgaggttcaactgctggccgtccttcgtcttgagcaacccttgcaggccgttcaggtagttagtgtcctgctcctgctgtgtggtatccaaccccaacttgttcagaatctgatttttaacgttttccacgttggtagcggacgccagtttctgtttggcgcagtactgcaaaataccggcggcattattcatattatcggcgctgagcgactgggcacctctgctgagcagaccggttagcgcagaaagcgacatcccgccctgctgtgcgttcgcgccctgagcgcttaactgactggcggcaataccgctggtggaaatcagtacgctggcgatcgccgcgcagcacagaacatgtttcgctgtattcatggtaatcacctgtgttatgccagtcaggcgtcgtatcgccttggcgcacgttgcaatttaatactctttacccgtcacccggctgcggtaactgtcccaggtaaaattaacccataaactgttgccgagacgcatacggtccatgacgcgttcgccaagcattttcgtcatctcttccatattgctgttcgtcaacatgccggtgggacgttttgacgaggaacgacgatcgacaatttgattgatgatcactttttcatagcgggattcggtctgcacgccgatctcgtcgatcaccagcagatcaacgttactcagatcgttaagcaactgctcttcgctggtttcccgattgctgaacgtgtctttcatcgctgacataatatccgctacggtgataatcagtaccgactttccgcgcagcagcagctcgttacaaatagccgcggcgagatggtttttaccggttcccggcttgccggaaaagacaaagctggcgatattgccgtcaaactcatcaacgtactgtcgggctttgcttaacgcgttcatttgtccgtcgcactcaacccgatagttatcaaacgaacagttctgatgcagcggtcgaatgccggaacggttaaaggtgcgctgcattttcatcgcccggttttcccgcgccagcgctgccgcccggatctcgccttgctctttctgccacgccagcaattcttcgcccgttttaaacgccggcgtaatatgcgcaggcatcattttttgtagacgctgcatcaggtcgccaacatttttcatcgttaccccctaaaacctggtggaatatgattgtcaggttcgctgacgctattgatgtcgcgctgcggcattccgccattgctggaacggctgatttgcacgctgcgcgccagcttttgctgccactggatatggtgaaaaaccttaccttccgcctgccagtaggcgataaacgccgccagctcttctgcggtgaccggctcccgaagcgccacgccccaaagggcagcctgacgctgaaaatccgcatccggttgccaggcgggatacatggcgaattttccgcagggaatcgcaacgggggcggcttcgggttcttcgtaaaattgtgcgtctaacgccacatcgcttcccggacgtgataacttttcttcaagcgccagcagttcagccatgcgtgcaggcgtcacggcataaaaggcaggcgcattattagcgaataccgccactgcgccgcccgttgacttcgccagcacagcatgatgatcgtgtaaaaggacgtcaataccgatgacgtccgacgttaaaattctggaagacataatgtttctcaatatggaacaacaaccgagaagggcgactgtttttatagtaccacacagacctgtaagaacagcaggaggcgttccaccaatcacacgcgggggcgtttgcggtacagccataatcccggtacagagaggccaattgagagcgcgccaacaatggaagaggctttcagaaaattggtcagcagcgtaatcatcatcggttcgctatagcccagatggctaatttttactgcggaaatcatcgcggtataggcggaaatccccggaaacatcgggatcacggccgcgacggtaaacactttagggtgagcgagataccagcgtgaccactgaataccaatactgccgaccagcagcgaagccataaacgttgaccattcgatattaaaaccagcgctcatcatcagcatacgcgagccatgacccagcgcccccagtagcgcgcaccacggaagcgcccggtggggaacgttaaagaccatcgcaaacccgacggcggggatcgcagacaagatcatgtcctgcattagcgccagtaaaaagtcgattatacccatcctcgtagcccccatactgtcattgacatcactacgcccacacaggtggccagtgtcaacaggctggcgatagcccagcgcgccagcccggtattaatatgtcctttaaacatatctgcgacggaattaatcagcggaaagcccggcaccagtagcagtacgctcgccgccatggcgatagtgggcgtctggctaaaggcgggaagggtgagcatcagcccggaaatcgtggtagcgacaaaggcggtaatgcaaaaattgatctgcggatgtaaatgccgctgcgccagcatctggcggatatacatggctatcatactggcgaaaaaggtgataaccgcgccatcccagccgccattattcagcttacaaaagcaggagcaggaaagaccgaccataaacgccaccagccagcgcggataacgcagcgggcggagctggctaaagcgtttttccacgcctttgtaatccagcagacgatgttccgcgaggataacgatatgctgaacctccgtgacgacgtgcatattaatgccgcgatcctggtttttacgtgtcgatgtcagacattgtccgtctttaatggtcgtcaggacaatggcgttagaggagatcgcgctttcgacgctatccataccgagcgccaaaccgagtcgggtggaaagctcatcaaccagtgcgctttccgccccgtgctgcaataaaaacagcccgcattgaatacataaccgtgttactgctcgttgaattgattgctcttcttgcatgactcgtcctgtccgaaaagacattctatgcgccgccactatgacagaggcttcctttttaacacgaagcacaggcatgatggcgttggttaagatcaatttcttgttgataaaaacgtcaaccgccagacgcaacgcataagcttcctgagacgtgcgcttcgtcacaggcaggatatccttatgggcgacggttctcgtatgtccgtttccagaatagaggcattatgccagcctggccgctcatttttgaatcaatgatgtggtgaattttatcaacgatatgcattaatggtttaacaacaatggcgtgagtagcgggcgtaaaattaggcatgacttagtataattcgcagatattacatgagttttatggatggtagacagtattgttgggcttttgttttaggactcagcaatatgaatgaagggcgaactcatattttaaatttattaatatgatgcgttttcgttagaattactaatgtgcaaatttagttaatttaattgtcttgcttctggttttatgagtaactatgcgatagtgatttcatgtttttgtgctatgtggattgtagcgcaatcaatgttatatttttaaaaataaaacaaggataattaatccactcggcttatatttctttgcgctcattgttaatagtgtttttattaatggggcaatgaaaagtggcggcgtgggtgcggaggaattatgctgccaggatgctgcaaaaatggacttattatcagtaaaacccctcttatacaggaaggccttaaaggggctataacaggtaatttccccgattataaactggcgtattgtcgtacgatagaagagctaacgctgctacagctacgccgaagtaatttagttattgctgatttagcagttaacaatgcctctccccgcgctatctgcgaatatttttatagcttactctcgcaatatcgcgacatacattgggtatttctggttcctaaatcctgctatccacatgcggttgatctcctgatgggccccgtcagcaccttgctttcagacgaagagccaatcgagaatcttattagcgttatccatgcgggaaacgctcgctcagaaagaataagcaaaacattattatcgcctcaggtaccgtctgaaattcagcagtcccacgacaggccgattgtccttacgctgtctgaacgaaaagtattacgccttttaggaaaagggtggggcattaaccaaattgcggcgttacttaaaaaaagtaataaaacaattagcgcccaaaaaaatagcgccatgcgacgcttatcaatacacagtaatgcagagatgtatgcatggataaacagttctcagggagccagagaattgaacctaccttcggtatatggagaaaccatggaatggaaaacagaatcagcaagagaaatgttgcgctcgtagaaaaatgcgtgatgagcaccattggtattaaagggctatttgatgcaatgccggattgccgacatacgcttcatattttttcaaaaccatccgcgttttataaggctgcgctaacgacgccgttttctgccgttattttttctctttctgcgttaagaactgaacgccggacaggattatccagcctgacggaactggcgataaattatccccatatgcggcgtctggtgattgccgatgatgatgctgaagctcgcttaatcagcgcgctatccccgctgccgctggatggggtcatcagcaaagcgtcgccgttggatgttttacaggatgccttatttacatcgcttaatagcgcccgacggacaacggagcgtacagacaatctttgggagcttcaccagaattgtatgcttagtccaaccgagcgggagattctgcgttttatgtcgaacggctactcaatgccgcaaattgctgtccagttagaacgtaacattaagactatccgagcgcataagtttaatgtgatgtccaagctgggcgtgagttctgatgccgggttactcgatgcggcggatattctgttatatctgcgcgccggcgatgctaccgcgctccagcatcgggtatagcccgcgccggatgcgccgtgcttgttcggggaatcagggtgccaggcacgttattggcacacgtctacccaggtcaccgatgtcagttcagccattctttccggcgtgatgcgtaccgcgctgtgcgtggcgcctgcggcaggcaatacttcgttataccccttcagagagatgtcgcaataaacgggcagcgggtgctccagcccgaaaggacatacgccgccgacaggatgtccggttgcattgaccacttcatcgctgctcaacatacgggcttttgcgccgaaagtggttttaagcttcttattatccaggcgggcatcgcctttcgcgaccaccaggataatggtgtcttttactttaagcgagagcgtcttagctatctgccctggctctacgttgtgcgctttggctgccagttcgacagtcgctgtactttgatttaattcgataatttcaatatcgggagcatgatcggccagaaattgccgtacagattgcagactcattcttctctcctgagaccttaccaatagccacggtagacccaaaaatggcaaaacgtaatttggcatacggagagcgccgctgtaaatataataatgtgacaggccagcagcagtaagccgtgacgataactgaaggcaacgtaaagcggtttactttagcgtgcagtcgccgcactgctgtacgtcaggtaagcggtaacgttggcagcaggttctgcgtaccagaagaccgtcgcgcattacgacggtccgccacagcgggttatcctgaccgtcggatagctgcttttcaaaaaaacagcgctggcgtagcgttgccagcagggcttcgccaagcagcggtttcatctcagtcagataccagttgattaaataaccggtattgctccagataagtttcgcgttgatgtcgccagtcgcctccagcgcctgaatgaccggctgtagtgcggagactattagcgtttccattcgttcttccggggaacgctccgttgccaggttatcctgatgcacatcaagccagaaacacgcggcgcgcccggtttcatgaaattcaacgtgaatatgttctgccgagacattgatagcgcgcgcttgcgtcagtaatgccagcatcagcggcggcgtcatcagcccgatataccattgcgcccatagggagagtaacggcttattttcacgtggcaggcctggcgtgtgccgatagatgtgatcggaataggcggccagcaatgaacgaaacgtcgcggggcgcgtccactgggcaagagtcatcgccgctggcggcggcgtttcatccagccggatgaagtccaacaggtgcttacgggtagaggcgatcgtctcgcgtactgcgtccgccagcgaggcgtcttccggctggggagcagctcgccagataatatcgtcagcaatcggtgcggaacggtaggccatagcgcagtttaatgatgttaatctaaatgataatgattgctaatcctatcgatagcgataaacgatggcaagcggtttatggttaacgctgttggcgtagcacgattacgccaacaggattcatagggcgcgcatgtcgtcgctgaccagaatgtggttacgtccaagatgcttggcttcgtagagcgctttatccgctttttcgatagcgtctccgatattgcgatccgtcaggggcgcaatgccgatactgacagtgacattggtggcgacgctttcgttaaacatatgcgggattttaagatcgtatacttcctgtcggatacgttctgcggtagcgcgggcttgctgtggttcggcggtggtcagcaacaccagaaattcttccccgccaaaacggcagacgacatcgcgcgatcgcacggcgtcccgaattgccgctgagacgcgaattaacgcctgatcgcccatcatatgaccgtagtgatcgttatacgctttgaaatgatcgatatccaatagcaggacgtagtgttcatggctgcccggcgcctgtaacgtatccagccgattttgcaggccacggcggttatataagccggttaatggatcaagcatactcaggccattgagggtttcccgctcggccagcagcttaaacatgagctgttgggcaaaattatcgtagcgtttctggataacatgttgaatagcgattcccaccattggcagggccagcaaatagagaattcgcaaaccttgttcattaccgttcagccacaggcagaccgcgactggcggtagcgaatagagcgtaaacgcgacgatattcgcggcaaaggctatcgagccgataaacagaacgctaagcagggaaatcagtaaaaaagagaaatcataatggcctaacgccggatactttagcgcaatatgcgccgcccatattcccccaaagagtagggagataaaggggagattaattcttttttgtccatatttcccatgccatatcaacagtaatacgctcaggaccactatcccgatcattggcgtgcaaaatacattgatctgataaagggggaaaacgagagtaaatagcgccgacacggcgttgagaaacaagaaaagacgtaaagaaaactgatacttcttaatacgaagcgaccgccaggatggtgttgtcatgggtaattgtcgttatttatcggtgatatacacggaatcgggcgccaacatgaaaataacgtatgagaaaaggtcgcctaaagcgaggtgttgttgtttttacgttaacagtcggacaatttatcaccttactgaatacgtgtcatcaaccgttaagtaaaactcatctctttagctttctccctggctgacaaatgagaaaatatatcatatgatattggttatcattatcaattccagaggtgaaaccatgttgcagcggacgttaggcagcggatggggcgtattattgcctggagtgattatcgttggactggcgtttatcggcctgtcagctgatgcgctgaagctgttgattgtatcaggattgctactgtctgcgctgatgttgtatcacaaacaattacggcattttgtactgctgccatcgtgtatagcgcttattggcggcatgatgttggcaatgatgaactggaatcagggatgaaaatgaagagacaaaggaaggataagataattggtgcgaggggggggacttgaacccccacgtccgtaaggacactaacacctgaagctagcgcgtctaccaattccgccaccttcgcataccatcgattcttgaaaagaatcactaccacggaggcgcattctagtggttttcagctattcgtcaatagttaattgcatgggatagattgattgctgcaaaaatggacgcgagacgtaggttggataagacgctttgcgtcgccatccggcacatgcaaccagatggcgctgcgcttatcaggccaactatttcttcgcctgacgggtcatcacggtacgataaaccttaaagcgcccggtttgcgcgatgacttcatggaagccaaaagtctcatccagaatcttaggatagggcagaaaggcgttcgccacgatgcgtaactctccgccgctgttcagatggcgcactgcgccgcgaatgagcgtttgcgccgcatcgaggctggtttgcattccgtcgtggaacggcgggttggagatgatcatgtcaaaacgtcctttgacttccgaaaagacgttgctggcgaatacctcgccttcaagaccattagcggcaagcgtggcgcggctggcttccaccgccggagcgctgacatcacacagcgtcaggcgcactttcggcgaatggctggccagcgcggcggaaagcacgccagcgccgcagccgacatccagcactttacctttggtgtgcggcgtcagcgtagacagcagcagttggctaccaacatccagtccgtcgcggctgaatacgcccggcaacgttttgatggtcagcccgtcgatgttgtactcggcccaccaggattcaagactaaactgcggctgcttttccagacggccatggtaaaggccgcaacgtcgcgcgctatctactttgttcagcggcgcatagtccgccagcatcggttcggcgctacgcacgccgctgcggttttctcccacgacgaaaacatcgacgcccgacggcatcagcgacaaaatattcatcaactggaactgcgcttcgggtttatttttcggccagtagtagatcagcgtatcgcagtcagcgacatcgctggcttgcgcgaccaggctaaaacggacgttatcgcccatctggcggcttaatacctgccagtggtgaaactgttgcgtatgcgcgcggctggcggcgcattcaaagcgcgcgggcaggtcatcctgcaaatctccggcaaaaagaatacggctttgttcgaaatcatcactgtggcgcagcaagacttcacttgccggggtaaaagcagacatggaatgctccttaattcagactggcggcgattatagtagtttgatggcgcagattcgacagatttgctatatttgcgcccctgattacaggagcgtttcgctatgacatcccgacgagactggcagttacagcaactgggtattacgcagtgggcgctgcgacgtcctggcgcgctacagggcgagattgcgatttcccttcccgcgcacgttcgtctgatcgtggttgcagaggaattacctgcgctgaacgagccgctaatgcgcgatatcttacgcgcgttgaccgtgagtcccgatcaggttttaccgctgacgcctgagcgcgtcgccatgctgccgcagggcagccgttgtaatagctggcggttaggaactgacgcgccgctccaactcgaaggcgctcaggtcacgacgccggcgtttaatgaactccgggcaaacccggcggcacgcgccgcactatggcaacaaatctgcgaacatgaacacgatttctatcctcagcacgaccgatctccccgcagcctggcagattgagcaacgcgctcatgcgtttccgtggagcgaaaaaacgtttttcggcaaccagggcgaacggtatctcaaccttaagctgaccgctgatgacagaatggccgcgtttgccattacacaggtggtgctggacgaagcgacgctgttcaatatcgccgtcgatccggattttcagcgtcgggggctggggcgtatgctgcttgagcatctgattgatgaactggaaacgcgcggtgttgtaacgctatggctggaggtacgcgcctctaacgctgccgccatcgcgctgtatgaaagtctggggtttaacgaggcgacgattcgccgcaattactatcccacggcacaagggcatgaggacgccatcatcatggcgttaccgataagcatgtaataaaagaggcaaggtgtaatgatgaagtgggactggattttctttgatgccgatgaaacgctgtttacgtttgattctttcaccggcttacagcggatgttccttgactatagcgtcacctttaccgctgaggatttccaggattaccaggccgtgaataagccgctatgggtggattatcagaacggcgcgattacctcattacaattgcagcacgcgcgctttcaaagttgggctgaacggctaaacgttgcgccggggctgctgaatgacgcttttattagtgcgatggcggagatctgttctcctttgccgggcgccgtttcgctacttaatgcgattcgcgggcaggctaaaatcggtattattactaatggttttaccgcgctacaacaaactcgtctggagcgcaccgggctgcgcgagtatttcgatctgctggtgatttccgagcaggttggcgtcgcgaagcccgatccgaaaatctttaactacgccctggagcaggcagggaatcctgaccgctcgcgcgtattaatggttggcgataccgcggaatccgatattcttggcggcattaacgccggactgtcgacctgctggcttaacgcgcatcatcgcgagcagcccgcgggtatccatccaacctggactgtggcgtcattaagcgaactggagcagctcctgtgtaaacactgattgcctcccccaggttgatgggtaaaatagccgcatttttcgtattcaacatgcgtggtcaaacgccgcgcttactcaagaagatttgactatgacgttgtctccttatttgcaagaggtggccaaacgccgcacttttgccattatttctcacccggacgccggtaaaaccaccattaccgaaaaagtgttgctgttcggacaggcgattcagaccgccggtacggtaaaaggccgtggctccagccaacatgcaaaatctgactggatggagatggaaaaacagcgtggtatctctatcactacctcggtgatgcagttcccgtatcacgactgtctggtgaatctgctggacaccccggggcacgaagacttctccgaagatacctaccgtaccctgacggcggtggactgttgcctgatggtgatcgacgccgcaaaaggcgttgaagacaggacccgtaagctgatggaagttacccgtctgcgtgatacgccgatcctgacctttatgaacaaactcgaccgtgacatccgcgacccgatggagctgctggatgaagtcgagaacgagctgaaaatcggctgcgcgccgatcacctggccgattggctgcggcaagctgtttaagggcgtttatcacctttataaagatgaaacttatctgtatcagaccggtaagggccacaccattcaggaagtgcgcatcgttaaagggctgaataacccggatctggacgccgccgtcggtgaagacctggcgcaacagctgcgcgacgagctggaactggtgcagggcgcgtctaacgagtttgatgaagagctattcctggcaggggaaattaccccggtatttttcggtaccgcgctgggtaactttggcgttgaccatatgctggatggtttagtggcgtgggcgcccgcgccgatgccgcgtcaaaccgatacccgcacagtggaagcctcggaagagaaattcaccggttttgtctttaaaattcaggccaatatggacccgaaacaccgcgaccgcgtggcgtttatgcgcgtggtttccggtaagtatgagaagggcatgaagctacgccaggtccgtaccggcaaagatgtggtgatttccgacgcgttaacttttatggcgggcgaccgttcgcacgttgaagaagcgtacccgggcgatattttgggtctgcataaccacggcaccattcagatcggcgataccttcactcagggcgagatgatgaagtttaccggtatcccgaactttgcgccggaactgttccgtcgtattcgcctgaaagatccgctcaagcagaagcagctactgaaagggctggtgcagctttctgaagagggggcggtgcaggtattccgtcccatctccaacaacgatctgattgttggcgccgtgggcgttttgcagtttgacgttgttgtcgcgcgcctgaaaagcgaatacaacgttgaggcgatttatgaatccgtcaacgtggcgacggcgcgctgggtggaaagcgctgatgcgaagaaattcgaagagtttaagcgtaagaatgaaacgcagctggcgctggatggcggcgacaaccttacctatatcgcccccacgatggttaacctgaacctgacccaggaacgttaccctgacgttcagttccgtaaaacgcgcgaacactgatccctttccgggcgcggcatccgccgcgccttcgtactttccctgcctttttaaccgcttacggaatgttcttaaatcccgcgttttttctccgatctgcctgttttttatacgcaccgacaagcgattttaaaattgtgatctatatttaacaaagtgatgacataaatgtcggctttaatgcctgttcaatgcgtgaatatgagagcttaaagctgagatttgtttcagtcacgatattaataactgaaacggaagggtggcaggcgacgcgtcgttacaaattcacgaatgtgatgccagtcattgacttcagaaaccggtgagtttcaccgcattcagcaatgcaacctcgtgttgcctgagctcaaattacgagcaaactatacaggacaaaatcgatgactatgacaagactgaagatttctaaaactctgctggccgtaatgttgacctctgctgttgcgacaggttctgcctttgcagaaaacgcaacaacggacaaggcgcaaagcggaaccgaaaccgcagggcaaaaagtcgatagctctatgaataaagtcggtaacttcatggatgacagcgccatcactgcgaaagtaaaagctgcgctggtagaccatgacaatattaaaagcaccgatatttctgtcgaaaccaatcagaaagttgtcaccctgagcggctttgtagaaagccaggcgcaggctgaagccgccgtgaaagtggcgaaaggcgtagaaggcgtgacctccgttagcgacaaacttcacgttcgcgacaataaagaaggttccgtgaaaggttatgccggcgatacggccacgaccagtgaagtcaaagccaagttgctggcggacgatctcgtcccttcccgtaaagtgaaagtggaaacgaccgatggcgtcgtacagctctccggtaccgttgaaactcaggaacaaagcgaccgcgctgaaagcatcgcgaaagccgttgatggcgtaaaaagtgttaaaaacgatctgaaagttcagtaattcgtcgtaattcgtcctcccgacgtttgtcgggaggcgtaatgtgcaccacactaaaaatatcgcgaatgagtagcctgagcgctcatatttagcggtcgacattaactatggtaaaggagaggcttatgtttcgttggggcattatatttctggttatcgcgttaattgccgccgcattgggttttggtggactggctggtacggctgccggcgcggcgaaaatcgtcttcgtcgtcgggatcgtgctcttcctggtcagcctgttcatgggccgtaaacgaccctagcaggcatctgtaaagatatattgctatcaagccagtccagcggactggcttttacggttttagccgttaacgttttgcgttaccttgtcagcctggaaaaaaatgaaaaacaggaaggcagaggtgggccagcgaataccggttacgctcggcaatattgcgccgttatcattaacaccgttccggccaggccgtatggcgctggtctgtgagggcggggggcagcggggcatctttaccgcaggcgtgctggatgagtttatgcatgcgcagtttaatcctttccatctctacttcggcacatcagccggtgcgcaaaatctctcggcgtatctctgcaaccagcccggctacgggcgcaaagtcattatgcgctataccaccaggcgcgaattttttgatccgctgcgatttgtacgcggaggaaaccttattgacctcgactggctggtggaatccaccgccgcccggatgccgctgcagatggataccgcagcgcgcctgttcgacagcggaaaatccttttatatgtgcgcctgccggggggatgattacacgccgggctatttctcgccgacaaaacaaaactggcttgatatcattcgcgcctccagcgccataccgggtttctaccgtaccggcgttacgttagagggcatcaactatctggacggtggcattagcgacgccattccggttcaggaggcggcaaagcggggggcgaaaaccattgtggtgatccgcaccgtaccctcgcaaatgtattacacgccgcagtggtttaagcgtatggagcgctggctgggagagagcagtctacagccgttggtcaacctggtgcagcatcatgaaacgtcctacagcgcgatccaacaatttattgaaaagccgccgggtaagctgcggatcattgaaatttatccgccgaaaccgctgcacagcatggcgctgggcagccgtatcccggcgctgcgtgaggattacaaaaccgggcgattatgcgggcgttatttccttgccaccgttggtaaattgctcgccgcaacgccgcctctcttgcgccatacgtcgcggattgccgtgccggaaacggtggtcgtgcctccggcgccggtggccaatgatacgcatgtggcggaggtcattagcgcgccgcaggcaaacgacaccacatttaccgacgaggatctggcgtgagctggcgctttatcgatacacactgccattttgatttcccgccctttacgggcgatgagcgcgccagtattcagcgtgcctgtgaggcgggcgttgaaaaaatcatcgtgccggcgaccgaggcggcgcactttccccgcgtgctggcgctggcggcgcgtttcccgtcgctttatgctgcgctgggattgcaccccattgtgattgagcgtcatgccgatgacgattctgataagctgcaacaagcgctggcgcagcaacagaacgtcgtggcggtaggcgagatcgggctcgatctttatcgcgacgacccgcagttcgccaggcaagagcgatttttagacgcgcaactgcaactggcaaaacgctacgatctgccggtgatcctgcactcgcggcgcacgcatgacaaactggcgatgcacttaaagcgccaggatctgccgcgaaccggtgtggtgcatggttttgccggcagtctgcagcaggccgaacgctttgtgcgactgggctataaaatcggcgtcggcggcaccatcacctacccgcgcgccagtaaaacccgtgatgttatggcgcgcttgccgctggacgcgctgttgctggagaccgatgcgccggatatgccgctaaaggggtttcaggggcagccgaaccgcccggagcaggcggcgcgcgtatttgatgcgctctgcgaattacgtccggagcccgcagaggtgatagccgatacgctgtatcgcaataccattaccttgtttcggctctgatggcatcgcagccgccgtccggcaggcgacgcttacaaatatagcgccggcaaaatcagcttcgccaccccacgcgcgcgcaatccgtcagccagccgttccacctcttgcggcgtcgcgcctggccaggctttcgcttcgccatagacaccgtgcgcatgaaaggcattcaaacgcaccggaacctcgcccagcgaagtaataaacgccgccagtgaatcgatatgcgccgcatagtccacctgacccgggataaccagcaaccgcagctccgccagttttccccgcgcagcaagaaagcggatactgtgcttaatatgcgtgttatcacgtccggtcagacggtgatgacactcgctcttccaggctttcagatcgagcattacgccgtcgcaaaccggcagtagtttttgccagccggtctcgcttaactgaccattactgtccaccagacaggtcagccgttgtaactgcggatcggctttgatcgccgtaaatagcgccacaataaacggtaattgcgtggtcgcctctccgccgctgacggtaataccttcaataaacagcgatgctttacgaatatgacgcagcacatcgtcaacgctcatggtctgcgccattggcgttgcctgctgtgggcacattttcaggcaggtatcgcactgctcgcagacgtccgaccgccataccactttcccgccatcaatgctgagggcgtggtgcggacactgcgatacgcattccccgcagtcgttacagcgtcccatcgtccacgggttatggcaattcttgcagcgcaaattgcagccctgtaagaataatgccaggcggctgcctggcccatcgacgcaggaaaacgcaatgatcttactgactaaagcgcatctgttgttcatggctgactacgcgtggctgtcgttccaggatgcgggtattacgtgcggcttcttctcccagccaggtggtattcgtgcgcgagccttcggcgcgaaatttcgccagatccgacaggcgcaccatataaccggtgacgcgcaccagatcgttgccgctgacattggcagtaaattcccgcatcccggctttgaacgcgccaagacaaagctgaaccagcgcctgcggattacgcttgatggtttcgtccagcgtcagaatgtcgctgatcccggcatggtaaaaggcatggtgcggcgcgacggtttgcaaatgggtgatagggtccggttcatcgccatacggcagacgcgcgcccggcgtagtgccaatatcggaactgatgccagactgggcatggagcagcgcccgttgcttccagccatacttcactggcgtattttcgacgaaatccgccagttgggcgctgatacggtagcccagctcgttcgccgtatcattcttgccgtaacgggcggtcaggcccgcgttttcgcacagcagattcacggcttccgccagcccgtacataccgaacatcggcgcaaaacgttcgggctcgatcaaaccttcctgtacaagaaagctattctcaaagaaatgtgatttttcatagaggaattcacatcgtgaattaatgatggcgatctgctgtcggcagtagtgcggtagcgtacgtgaaaagaagtcatcgacagacgtactgcgttctgccacggctttcaggttgagacgtaccagcgtactgccgccgccgccaagcggtagcgagttataacaactgacgatgccataatggccttttgtgaaaattttatcatttacagggccattggaaatgtgtggcttactgcattcacaaatgtttttggcgacctccagcagcagatcgtccggcgtaatttccgcatcgtagataaacgtcaggttaggcgccacctgctttagctcggcatcggcgcgcaaaatcgctcgtgtgacaggcgtatcggcagggccaatattggcatgcataaaggcgtctggcagcgttctgtcgagataacgccagaaacgttttattcgaatatcgatcgcatcttgtgttagaattctaacatacggttgcagcaacgcatcaagctggccgagataaaccggcatggacgtcacggaaggaacgtgatgatacagaatggtgagtagggataacgcatcatccagatctttcgcgccttccagttccagccactgtgaaccgttagccagaaatcgggcgtaatcgggcaacacgtagcgcggtttgaagggggcgtgcccctcaaacatatcgcaaatgacgccttcatccagcgcctggcgggcatcttccggcagggtgggataaggcagggcgttttcagcttccagcgccagaaaatggcgtttttgttcaggcgtgagcaccgggctggtcacaatttgctggcaacgctgctggagcgcagtttcgcatgaggcaggcatcttcgtttcctctttatgccgggacgatgcgctattgtagaaaatggcggcaaaccgactttgatcctgatgcgcttatcgctcgaagaacagacggtgacggcgggataatttgattcagatctcattacagtaatgcaaatttgtacgtagttttcattaactgtgatgtatatcgaagtgtaatcgcgagtgaatgttagaatattaacagactcgcaaggtgaaattttatacggcaatgccgttggagaatgtcatgactgatttaaaagcaagcagcctgcgtgcgctcaaactgatggatctgaccactctgaacgatgacgacaccaatgaaaaagtgatcgcgttgtgtcatcaggcaaaaactccggtcgggaatacggcggcgatttgtatttacccgcgttttatcccgattgcgcgtaaaactctgaaagaacaaggtacgccggacatccgcattgcaacggtgactaacttcccgcatggcaatgatgacatcgatattgcgctggcggaaacccgtgcggcgatcgcctacggcgctgacgaagtggacgtggtattcccgtaccgcgcgttgatcgccggtaacgagcaggtgggttttgacctggtaaaagcctgtaaagacgcttgtgccgcagcgaacgtattgctgaaagtgattatcgaaaccggcgagctgaaagaagaggcgctgattcgtaaagcctctgaaatctccattaaagccggtgcggatttcatcaaaacctctaccggtaaagtgccggtaaacgctacgccggaaagcgcgcgcatcatgatggaagtgatccgcgacatgggcgtttccaaaaccgttggcttcaaaccggcgggcggcgtacgtacggcggaagacgcgcagaaattcctcgcgattgcagacgaactgtttggcgctgactgggcagattctcgtcactaccgctttggcgcatccagcctgctggcaagcctgctgaaagcgctgggtcacggcgacggtaagagcgccagcagctactaagctctgatttgccggatggcgctgcgcttatccggcctacaaatccaggcctgtaggccggataaggcgttagccgccatccggcgatgtaagccttctactcttttccctcaggagggtaccgtgtttctcgcacaagaaattattcgtaaaaagcgtgatggtcatgcgttgagtgacgaagaaattcgtttctttattaatggtattcgtgacaatactatctctgaagggcagattgccgccctggcgatgaccatcttcttccacgatatgaccatgccggagcgtgtttcgctgaccatggcgatgcgggattccggtactgtccttgactggaaaagcctgaatctcaatggcccgattgtcgataagcattcgaccggcggcgtaggggacgtgacgtctctgatgttggggccaatggtagcggcctgcggcggttatgtgccgatgatctccggtcgcggcctcggacataccggcggtacgctcgacaaactggaagcgatcccgggcttcgatatcttcccggacgacaaccgtttccgcgaaattattcaagacgtgggtgtggcgattattgggcaaaccagctcgcttgcaccggcggacaaacgtttttacgccacccgcgatattaccgcgacggtggactctattccgctgatcaccggctccatcctcgccaagaaactggccgaagggcttgatgcgctggtaatggacgtaaaagtcggcagcggcgcgtttatgccaacctatgaactttctgaagcccttgctgaagcgattgtcggcgtggcaaatggcgcgggagttcgcactacggcgttgttaaccgatatgaaccaggtgctggcttcaagcgccggtaacgcggtggaagtgcgtgaagccgtgcagttcctgaccggtgaataccgcaatccgcgcttgtttgacgtcactatggcgctatgcgtggagatgctgatctccggccagctggcgaaagacgacgccgaagcgcgtgccaaactgcaggcggtgctggataacggtaaagcggcagaagtctttggtcgtatggtggccgcgcagaaagggccaagcgatttcgttgagaactacgataaatacttgccgaccgccatgttgagcaaagcggtatatgctgataccgaagggtttatcagcgcaatggatacgcgtgcgctggggatggcggtcgtctcgatgggcggcggccgtcgtcaggcgtctgacaccattgattacagcgttggctttaccgacatggcccgtctgggcgacagcatcgacgggcagcgcccgctggcggtgattcatgccaaagacgaagccagttggcaggaagcggcgaaggccgtcaaagcggcaattatccttgacgataaagcgccagcaagcacaccttcggtctatcgtcgaattactgaatagttgtatactgatctgatcaattatttttgaagcactaagtacggagaagatatgaaacgtgcatttattatggtgctggactcattcggcatcggcgctactgaagacgcggatcgttttggcgacgtaggttccgacactctgggccacatcgcagaagcttgcgccaaaggcgaagctgacaatggccgtaaaggcccgttgaatctgcctaacctgactcgtctggggctggtgaaagcgcatgaaggctctaccggtaaaattgccgccggcatggacggcaacgcggacgttattggcgcatacgcatgggcgcacgaactgtcctccggcaaagatacgccgtccggccactgggaaatcgccggcgtgccggtgctgttcgactggggctatttcagcgatcacgaaaacagcttcccgcaggaactgctggataagctggtgaaacgcgctaacctgccgggctacctcggtaactgccactcttccggtacggtcattctggaccagctcggcgaagagcacatgaaaaccggcaagccgattttctacacctccgctgactccgtgttccagattgcctgccacgaagagacctttggcctggataaactctacgagctgtgcgaaatcgcccgtgaagagctgaccgaaggcggctacaacattggccgcgtgatcgcgcgtccgtttatcggcgacaaggccggtaacttccagcgtaccggtaaccgtcacgacctggccgtagaaccgccagcgccgactgtgctgcagaaactggtcgatgaaaaacagggccacgtggtgtccgtcggtaagattgccgacatctacgccaactgcggcatcactaagaaagtgaaagcgaccggtctggacgcgctgttcgacgcgaccctcaaagagatgaaagaagcgggcgataaaaccatcgtcttcactaacttcgtcgacttcgactcttcctggggccaccgtcgcgacatcgcgggctacgccgcaggcctggagctgtttgaccgccgtctgccggagctgatggagctggtgggggaagatgacattctgatcctgaccgctgaccacggctgtgacccgagctggaccggtactgaccatacccgtgagcacattccggtgctgatctacggtccgaaagtcaaaccgggctctttaggtcaccgtgaaaccttcgcggatatcggccagacgctggcgacctactttggtacatcgccgatggactacggtaaaaacatgctgtgatacctgttgtctttcgcgctgtagatgcgttgacttcattcgctcaccccggtcacatagttaatctatgctcccggggattcacgaattcgtcgccttcctacaacgcgaaatacttagggtatttcactgttttgacacacgttttgtaggcctgataaggcgtagccgccatcaggcaataacaacaaatttaaagggaactgaagatggcaactccacatattaatgcagaaatgggtgatttcgctgacgtcgtattgatgccgggcgacccgctgcgcgcgaagcacattgctgagactttcctcgaaaatgttcgcgaagtgaacaacgttcgcggcatgttaggtttcaccgggacttacaaaggccgtaagatctccgtgatgggccacggtatgggtatcccgtcctgctccatctacaccaaagagctgatcaccgatttcggcgtgaagaaaatcattcgcgtcggctcctgcggcgctgtgcgcatggacgtcaaactgcgcgacgtggtgatcggtatgggtgcctgcaccgactccaaagtgaaccgtatccgttttaaagatcatgacttcgcggctatcgctgacttcgacatggtgcgtaacgcagttgatgcggcaaaagcgctgggcgttgacgcgcgcgtaggcaacctgttctccgctgacctgttctactctccggacggcgaaatgttcgacgtgatggaaaaatacggcgtactgggcgtagagatggaagcggcgggtatctacggcgttgcggctgaatttggcgcgaaagcgctgaccatctgcaccgtatctgaccatatccgtacccacgagcagaccactgccgctgaacgtcagacgaccttcaacgacatgatcaaaatcgcactggaatccgtactgctgggcgataaagagtaagattgtgaagggggccagagcaggcccccttcatcgtttatttcgtcagcacttcccactgtaaattgctttctagcatgaccgtatcggtagcatgcgtaaattgattatcgttcaagacaggtgttaatgtcagcgtgacgttcatcattttcccactgacctgctggttattatccatcgcgatgataccgttgttattatgtagcaacagactatccagggcactgtcattgggagcaaagctcactctatcaagggtgctggcaataggataacttttaccatctactatcatctgactaacacgtacggcgagaccaccgttatttccaaaataaaatcgtcccttttcccccgctgaggcctgcacaaaaagagcaatattctggctttctgggcaactcacactaacgtgaacctcctgtgaagacatttgattccagccttgctgagaattgacgatatcatcttgcttaagccagccaaagctgacgtttggcgaagaaaacgttatttggcagtcatcgtcggcccgggctgatggggggagtagtgcggtgaagatacaacatatagcaatccccaaccatttgctgttggatttcattgacagactccctttgccgtttcataaaatgcctctttatcctgggttttctgcagcgtgtagtggatgcgacacagacgattcatatcatcatcagcggcatataacgcaggattatccccaacatcggtgataaatacgcgtccgctgtcgacagcgctgaccaaatagttatttttttcatctacaatgctggtgcctttaggtagccatgagccatccggacgctttactgccagcatcacacggcgtgtattcagcacgttgaaatccagtacccgaaaagcgctgtgcgcgacggtaatattcttaataccgtttgccagttccatactctttggtagcgtattcgcattaacctctacgcgggatttccgccattcagttagccccggaatgacggcttgcccccagtggtcagtccagattcgcccctgtggcgtggcgatttcaatgccgctttctggttcactcaggcgtgcgatagcaaaggtatttttgattgtataaggcgagaacgttatgccatgttcgtgtgcagcgatgcctccgctgaaggttgcgttatagttgcggtaattatcgccatcagtgccgccgcccacgctgagttgagtgtaatgaagattgctattgagattaccgttgaagctattttgctggttttttgcatcacgatccgcagaaatatagtaatgggtatctttactcagcgaaccattattttgtagcccgtaggttgttttatcaccttgattacgcatataagcgccgacgcgctgctcacctagtggaatgctgatgttgatgtaaaacatatcatcatcattactgtcgttatgattctcatcatcctgattaacagcgtgctgccagttagcggtaattgaggcatatttaaacgttttgccccaggaagccattatactgcgagagtcgttgtcattatccgtagcctgataagtgtaataacccagagagaaggtacctaacagattatggttccaggcaatattagcactggagctactttgatattcgtaagcatctttattgagcgcatccgttaactcacgatatccgtcgctgtagcgggcggtactgacgtcaagtctaatttccccgggcagcgccatgctggcgcgtagttcacttttcgcaccctgcagagattcgccaaaggacgctttactgcccagcattgagccggaaaacgtccatttattggttggaagccattgcagcatccctcctgccgcttgatagtcttgtgccagtacgccagacgcctgcgccagccagttttcactcagtttccaaccatcgctgatgttatagatccaggggagcgaatagtcgctggtggtatcacgtatgcgccctatggacattgttaagcctgcgggcgtgagttcgcgtaaattaaaggatactgccggcaccgtgaaggttgtcgttgagccatcggtttcaacgacgctgacgttaaggtcggtattgctgcgtatgatggggacattttcaagggtaaatgccccagcgttcactggtgcggtataaataatctgtccggactgacgaacttcaacgcgagcctggtgggttcgggcaataccgttaatggttacgccttgtgtatcctgtgccagcccttgttcagggataagctgtacgccgttgatcggcgcgccactgaatagactggagttgacgttgatctgcccaacttgcgcacgcattttttgtgcctgaaatacgtgctccgcataggtatatagactatcggtacggtattctccatcattattcgtcagcatgtagcggctgcgcagcgtccattccgcgaagtttaagccagcttcaaggtttgcctgggcatagtttcggctatcgctaccggatgactcgctgcgactggcgtacaggttatagttaaataacccggcggtgccgcctttaatcacgttgtttagcgatagtaagttattatccagagcctgtgccggaacaaaaagctccagcgattcactgtttggcagtggggtaataatcgctgagggataatcttcttgtaggctatggcaggtttctttggcgctgatattaagcgaaacgagcccgctggcgctgaggaaatcgtcatccacgcaaagctggccttctgtgtcgaaacgcgcgaccaacgaccctctatttacgccattgatctttaccatgacggtgtggctgcctggtagaaagcgcggcgcgcgggaaaaatattgtgcgacgttggggctaatgcctctggaggtgagaatacccatgtcaaaattcagctcctccgccagagctgaaaacgtcgtggttgccagtgagcaataaagcgcagttttgatgtatagcggcagttttaaatacttcacgtgctagctctcattacggcaccagcggtgaggtaaagctggggacttcaatgccgtaacggctggcaggataaaaacgtacggatgtatcagcagcaaagggcgtttttatactgacgttcaatgtttcgccgggcagaatataggtttttttaatcgtgccttcgcccccggaaggtaagaaggtaatattttgggctaaacgtacaacgtagggagacggatttttgacgttgattgtttgtccgtttctggaccaggttaataatttccaggcatcagtaacgaccggtagatttttaggacgaattaataccggcaaatcctggcgtagattaaaacctattttcattcctttatcggtagatttcggaggaataccttcaaacgtgacgcgcttatagtgctcgacggtgagcggttccgtactttccataataaagcgtagttgctgctgctggcctgcttcaacgcgaacaactggttgagtgacatccagtttcacaccattgtcgtcaggtaaatcaacgacggtggtatataacaaagccggattgctgtcggtgtttttaacattcattacgccgctgtgtgtggattcttcaatcaccagtagcgtagtttccggtaccatgccggcagcgttagcctgtgaaaagagtgttgaaaaaacaaaggggacgctgagtaataataatggaagtttagtcactgctggcatcagaattagtcctttaattttaatctgtctccccataataagggagacagatcaataacctttttacacggtctggatcagagatatttaagcgtgatggttgcctgaccatccagatcagtatcatcagtaatggccagcgttgcagtattctgaatagccagtgaggttttcagcgggaaaatggcgagggtatacggaaccggttcggtggtgccttttgtagcaacggtaaacatttccatattgccgtttttgataatcccggtggaagacttctgccagactgggctatcaacggttcctgagatagcgtcagattttacaccatcagcggtaacgttcgcggtatcggtataaatagagaacgcgccgatttttacaccttcggttgttttgccaacgccgtaggacattgtggtatcagatactatactattagtcatatcgccattggctatggagataacggatgcgcctgggtgggtgtccgcacggtcatcggtaatagtccatgctgctttggttgcagacggacaagagatactcagagagacatctttagtacccagttggtttacatcggttgcggaaagtgtggcgaggcggatagtaccgtaatcaaccacgccgccgccgctgagttctggggtacaaccaccaacaaccagttgaccggtgacttttaatacggcagtagtgtcagcattcacgctggttgtagcaaaggaagctgcaattgcagtaataagcaaaatttttttcattatagttccattaaagaggtgttgaatattccatgtgaatgctggagttacagatatacgagtgtaaaggtcgcctgaccatcaagcgtggtgttatcggtaatagccagtgtgtccgttccctgtatagcggcagctacgcgtataggaaatgttgcggtggtaaaagcaacggggccatttccatcgccgacactatatgtagtgcgggttggaaatgtatttgtaagcgcaacgtattcgtttgatgctaaagcccagacaccaggattcgaatcatttgacgctaccatcttcgtcttaactccatcggcggtcgaattattcgcgtctatggagaggccgtatgcaccaatcttgataccatctgctgttgtacccaggcctagctgatagtttggtattctattgttctgaccgccaaatgttgcgttatcgatagtcagcgttgtcgccgaatcgccatgattgtcggtagcgacccagccaacttttgccggtgcaaggcactgaatcgtgagtgttatatctttgtatcccagttgattcgtctgagttggcagcagatcgctaacggccttagtaccgaaatctacaacgccaccatcacttaactctggtatacatgcgccgttggttaaaacgccagtcagttttaatacagcagtggattcaaccgcttgcgctgaagttgataatcctattatgacagaggtcgctattaataattttttcatcagtaatccctaacgattaagtatatttccaaatgacatgtaatgcgcgggtcgggattctatgaagataatgatatgttgtaaatttaataaaattaaatcttggttaagaaaaactttaatcatcattggtgatgataaatggtttataattcgctgggtttatgaagtgcggggaaataatattaattttaaagaatatagtagttagtgagtgtgttttaactatttgtgctattcactcatttttcagaatatgttgttatgtttaaataatatcagagacacattcgtctctctgatattattcatttagcgcacagcttctgcaatccacgccgacagttcccgcagttctttttcctgctccgggaaatcaaccagtagcgcctcgcacgtttcctgtagtttatccgcgcggtacaaacacccttgcagccgctcggccagcgcttccagcggtgccgggttcaggctatcggtaaatgcctgtgcgcgggtaatcacacctttctcgacgtcaaaatgcagctcgacgccgccccaggtgaaacgctcgtccagcagatggctgaacgctggtgcctggccgaaattccactcccaactgctctggcgcgcaaaggtttcggcaaaattcggcagatccggcgttttatccggtgaaatcacttccgcgtcgacgcgttcgccgtaatgggcgaaaaaggcttccgtgaccgcctggcagacctgttcatgggtgatacccggtaatagctcggtaagattggccacgcgggagcgaacggaggtgattcctttcgccgcaagtttctttttatcgggattcagatagtttgccagacggctgaggtctgcattcagcagcagcgtaccgtgatggaagccgcgatctttggtttcgcgataggctgaaccggagactttgcgatcgccgtccggcgtttttacgaccagatcgttgcgtcccgaagcatcggccatgacccccagcgaattcagcgccgcgagcacaatatgggtggagatggttttatcgtattccggtttaccagccataaaggtaaagcaggtattaccgaggtcatggaataccgcgccgccgccgctgctacggcgggccagacggacattatcttcttccatacgccgcgtattacactctttccacgggttttgcgcgcgtccaatgaccaccgtatccgcgttgcgccacaggaacagcacgcgctgggtggcgggcatctggcggaaaatgcactcctcgaccgccaggttaaaccagggatcgtaagagtcagaaataagcaggcgtaatgttgtcatagtggttttccttacctttattaagccgtcattttactctttttcctcacgctcttcctcttccggaacaggcttgctggccgttagcaggaagggcgactgctgccagcgggtgcgtttaccttgtagcaaggtgcgcgtcagcaccacgcctatcgccagcgagagtagcagcatcaggcgtagaatgttggtggtgttatcgacctgctttgcttcggtggccagcgtgtgggtatccagcgttagacgcaggtagcccaatgggccgtttttcccctggataggctcgacaatttgttggttaaaatagctgcccgcttttttgccatccagcgccagcctgtcgcgcacattgacgctttcgccagcgcgagtaataagatcgccctgttcatcatagacgccggcatccagaatacggctctcttgcgtgagctgacgcagcacggcgttgatgcgattttcatccggtgtttcgctgcgcatcagcggggcgatgttgagcgtcacctggcgcgccagcgtgcgggccagctcttccagctgcgggttgcgctgtcgctggtggttttgactaaaccaggacgcgccctgcataagcgcgacgagcagtgtgagacagaacaatacaatgactgcacgatgcagccgaaatttcagttttgcgcgagccatattccacctgctgaaaatttgaggcttaatgttgccagaagcgatggttacaaggtagcctcatgcgttattttccgcggggcggttaccggcctgaacgatttacaggagctttaatgcctaacattacctggtgcgatctgcctgaagatgtctctttatggcctggtttgcctctttctttaagcggcgacgaggtgatgcctctggattaccatgcaggccgcagcggttggctgctgtatgggcgcgggctggataagcagcgtttaactcaatatcagaccaaactgggcgccgcaatggtgattgtcgccgcctggtgcgtggaggattatcaggtcattcgtctggcggggtcgctgacgccgcgtgcgacgcggctggcgcatgaggcgcagctggatgtcgcgccgctgggtaaaattccgcatctgcgcacgccggggctgctggtgatggatatggattccacggcgatccaaattgagtgtatcgatgaaatcgcgaagctggccggtaccggtgagaaggtggctgaagtgacggagcgcgcgatgcgcggcgagcttgattttaccgccagcctgcgcagccgcgtggcgacgctgaaaggcgcggatgccgatattttgcgacaggtgcgcgggaatctgccgctaatgccaggattaacgcagttggtgctaaaactggaagcgctcggctggaaaatcgctatcgcctccggcggcttcactttcttcgccgactatctgcgtgaccagctacgtctgacggcggcagtcgccaatgaactggagatcatggacggtaaatttaccggccacgttatcggcgatattgtggatgctgagtataaagccaataccttgcttcgtctggcgcaagagcatgacatcccgctggcgcagacggtggcgattggcgacggcgctaacgatctgccaatgatcaaagcggcagggttaggtattgccttccatgccaagccaaaagtaaacgaaaagacggagattacgatccgccacgctgacctgatgggcgtgttttgcattctctccggcagcatgaaccagaaatgattaacctgcccaatggcaaggcgaccgtaggccggataagcgccagcgccatccggcaacagcgttaacgaaagaggtaaaacgtggcaaaagctcccaaacgcgcctttgtttgtaatgaatgtggtgccgattacccacgctggcaggggcaatgcagcgcctgccatgcctggaacaccattaccgaggtgcgccttgccgcgtcgccgacggtggcgcgtaacgaacgtctgagcggatacgccggcagtgcgggcgtatcaaaagtgcagaaactgtctgacatcagtcttgaggaactgccgcgcttttctaccggttttaaagagtttgaccgcgtgctgggcggcggggtggtacccggcagcgccattttgattggcggtaaccccggcgcgggcaaatcaacgttgctgctgcaaacgctgtgcaagctcgccgagcagatgaaaacgctgtacgtcaccggcgaagagtcgctacagcaggtggcgatgcgtgcgcaccgtctcggcctgccgaccgctaatctgaatatgctctccgaaaccagcatcgagcagatctgcctgatagcggaagaagaacagccgaaactgatggtgatcgactctatacaggtgatgcatatggcggatatccagtcgtcgccaggcagcgtcgcccaggtccgcgaaacggcagcctacctgacgcgcttcgccaaaacgcgcggcgtggcgatcgtgatggtcggccacgtcaccaaagacgggtcgctggcggggccgaaagtgctggaacactgtatcgattgctcagtattgctcgacggcgacgctgattctcgtttccgcacgctgcgcagccacaaaaaccgctttggcgcagtcaatgagctgggcgtcttcgccatgaccgaacaggggttgcgcgaagtgagcaatccgtccgccatctttttaagccgtggcgatgaggtcacttccggcagttcagtgatggtcgtctgggaaggcacgcgaccgttgctggtggagattcaggcgctggtcgatcactcgatgatggcgaaccccagacgcgtggcggtcggtctggaacaaaaccgtctggcaatcctgctggcggtgctgcaccgacacggcggtctgcaaatgtcggatcaggacgtcttcgttaacgtggtcggcggcgtgaaagtcaccgaaaccagcgcggatctggctttactgctggcgatggtctccagcctgcgtgacaggccgttgccgcaggatctggtggtgtttggcgaagtggggctggcaggcgagattcgtccggtgccgagcgggcaggagcgtatttccgaggcggcgaaacacggctttcgtcgggcgattgtgcctgccgccaacgtaccgaaaaagccgccggaaggaatgctggtgttcggtgttaaaaagctcgcagatgcgttaagcgtgtttgacgacttataattctctgtatgtagtgatgttgtataatttgccggatggcgatgcaatgcgtcttatccggcctacggattgatacggattgatgttgtaggcctgataagcgaagcgccatcaggcagtgttatgcgatttttccagcaggaggctcttgtgtcatcgttcgactatctcaaaaccgcgattaagcagcaaggttgcactctgcaacaggtggctgacgccagcggtatgaccaagggatatctgagtcagttacttaacgccaaaatcaaaagccccagcgcgcaaaaactggaggcgctacaccgttttctcgggctggagtttccccgccgacagaaaaacattggcgtggtgttcggtaaattttatccattgcataccggacacatctacttgatccagcgcgcctgtagccaggtggatgagttgcacatcattatgggatatgacgatacgcgcgaccgcgggctgtttgaggatagcgccatgtcgcagcagcccaccgtgtcggatcgcctgcgctggttattgcaaaccttcaaataccaaaaaaatattcgcatccacgcctttaatgaagaggggatggagccttatccgcatggctgggacgtctggagcaacggcattaaagcgtttatggcagagaagggaatacagccgagctggatctacacttccgaagaggctgatgcgccgcagtatcttgagcatttagggattgagacggtgctggtcgatcctgaacgcacgtttatgaatatcagtggggcgcaaatccgcgaaaatccgtttcgttactgggaatatattcctaccgaagtgaagccgtttttcgtgcgtaccgtcgcgattctgggcggggaatcaagcggcaagtctacgctggtcaataagctcgccaatatttttaataccaccagcgcctgggaatatggccgcgactatgtcttttcgcatctgggcggcgatgagatggcgttacagtattccgactacgataaaattgcgctgggccatgcgcaatatattgatttcgcagtgaaatatgcgaataaagtggcgtttatcgataccgatttcgtcaccacccaggcattttgcaaaaaatacgaaggacgcgagcatccctttgtccaggcgctgatcgacgagtatcgcttcgacctggtgattttgctggagaataatacgccgtgggtagctgacggactgcgaagcctgggcagttcagtggatcgcaaagcgttccagaacctgctggtcgagatgctgaaagagaacaacattgagttcgttcacgttaaagaggctgattacgatggtcgctttttgcgctgtgtggaactggtgaaagagatgatgggcgagcagggataagaaccaatgcctgatgcgacgcttaccgcgtcttatcaggcctacagtttcacaacgtactggaatcgctgggtttgtaggccgggtaagcgcaagcgccacccggcattcagacatttatttggcaatacgcttgtacttgatacgcttcggctccagcgcctcggcgcccagcgtgcgtttcttgtactcttcgtattcggtaaagttgccttcgaagaattccaccttaccttcatcctgataatccagaatgtgggtggcgatacggtcaaggaaccaacggtcgtgcgagataaccatcgcgcagccagggaactccagcagggcgttttccagcgcgcgcagggtttcgatatccaggtcgttcgtcggttcgtcgagcagcaggacgttgccgcccacctgcagcagcttcgccagatgcaaacgaccgcgctcaccgccggacagttcgccaacgcgtttgccctgatcgacgcctttgaagttgaagcggcctacataggcgcggcttggcatttcagtgttgccgatcttcatgatatccagcccgccggacacttcttcccagacggttttgctgttgtccatcgcgtcgcggaactgatcgaccgaggccagcttgacggtttcacccagcgtaatggtgccgctatcgggctgctcctgaccggacatcatgcggaacagggtcgatttacccgcgccgtttggcccgatgatcccgacgatagcgcctttcggcaccgagaagctcaggtcgtcgatcagtacgcggtcgccgtaggatttacgcaggttgctgacttcaatgactttgtcgcccagacgcggtcctggtggaataaacagttcgttggtttcgttacgtttctgatactcaacgctgttcagttcttcaaagcgagccagacgcgccttacctttcgactgacggcctttcgcgccctgacgcacccactccagctctttctcaatggatttacggcgcgccgcttcggcagacgcttcctgcgccagacgctgatctttctgctccagccaggaggagtagttgccttcccacggaataccttcgccgcggtcaagttccagaatccagccggcgacgttatcgaggaagtaacggtcgtgggtaatcgccacgacggtaccttcgaagtcgtgcaggaaacgttccagccacgcaacagattcggcatccaggtggttggtgggttcgtcgagcagcagcatgtccggcttttccagcaacagacggcacagcgccacgcgacggcgctcgccgccggacagtttttcgactttggcatcccagtccggcagacgcagagcgtcagcagcgcgctcaagctgcacgttcagattatgaccgtcgtgcgcctggataatctcttcaagtcggccctgctctgcggccagcttgtcgaagtcggcatccggatcggcatacagcgcgtacacttcatccagacgtttgagggcgttaaccacttccgaaacggcctcttcaatcgactcgcgtaccgtgtgttccgggtttagctgaggttcctgcggcaggtagccaatcttaatgccgggctgcgggcgcgcttcgccctcgatatctttatcgagccccgccatgatgcgcagcagggtagacttaccggcgccgttaaggcccagcacgccgattttggcgccagggaagaagctcagcgagatgtttttcagaatatgacgtttcggcggaaccactttgccgacacgatgcatggtataaacgaattgagccacgttggacttcgcctctatgtttatcgtgatggtgaatagatgtcaaaggcgaagtgtagcctttttccctgcctaagcccagccagcagatcgcactcgcaataaaagtaaaaaagtgtccgtaacgtggcgcaaatggctatgactggttagcataaattcattacgcggcatgatgctgcattggataacaattgaggaagtgcttgtggatagagccaaaccatttgtctggcgtctcgtcgccgccagcgtatgcctgctgaccttttgtcacctcgcgcgggccgactcactggaagagcagcgtaaccgctatgcgcagattaagcaggcctgggacaaccgccagatggatgtggtagagcagatgatgccgggtctgaaagattatccgctctacccgtatctggaataccgtaagatcaccgacgatttgatgaaccaaccggcgattgctgtcacgcagtttgtgcgcgccaatcctacgcttccgcctgcgcgtacgctgcaatcacgcttcgtcaatgagctggcgcgtcgtgaagactggcgcggcttgctggcgtttagcccggagaaacccggcaccacggaagcgcaatgtaactattactacgcgaaatggagtaccgggcaaacggaagcggcctggcagggcgcgaaagacctttggctgaccggcaaaagtcagccgaatgcctgcgataaactgttcagcgtctggcgggcctccggcaagcaagacccgctggcgtatctggaacgtattcggctggcgatgaaagccggaaatacggggctggttacggtgctggccggacagatgccggcggaatatcaaacgatcgcctcagcgatcattaccctcgctaatgaccctaataacgtgttgatctttgcacgcaccaccggcgccaccgattttacccgccagatggcggaagtcgcgtttgccagcgtcgcccgccaggacgcggaaaatgcgcgtctgatgatcccctcgctggtacaggcgcagaaacttaatgaggaacaaacgcaggcgctgcgcgatatcgttgcctggcgactgatgggcaacgatgtgaccgatgcgcaggcgaaatggcgcgatgacgcgattatgcgctcgcaatcgacgtcgcttatcgagcggcgcgtgcgtatggcgctggggatgggcgatcgtcgcggtctcaatacctggcttgcccgcctgccaatggaggcgaaagagaaagacgagtggcgttactggcaggcggatttattgctggagcgcggtcgtgacgccgaagcgaaagagatccttcatgctttaatgcagaagcgcggtttttatccgatggttgcggcgcagcgtttaggcgaagagtacacgcttaaaatcgataaagcgcccgccaacgtaaacagcgcgttgacgcaggggccggagatggcgcgtgtacgggagctgatgtactggaacctggataacacggcgcgcagcgaatgggcgaatctggtaaaaagccgtagtaaatctgaacaggcgcagttggcgcgctatgcgtttaaccagcactggtgggatctgagcgtacaggcgacgatcgccggaaaactgtgggatcatctggaggagcgtttcccgctggcgtataacgatctttttacccgctatacccgcggaaaagatatctcacaaagctatgccatggcgattgcccgccaggagagcgcctggaacccgaaagtaaaatcgccggtaggggccagcggcttaatgcagattatgccgggaacggccacccatacggtgaaaatgttttcgattccggactaccgcggccccggccaactgctggagccggagaccaacatcaacattggcaccagctatttgcagtatgtctatcagcagtttggtaataaccgtattttcgcctcggcggcgtataacgccgggccggggcgcgtgcgcacctggcttggcaatagcgccgggcgtatcgatgccgtagcgtttgtcgaaagcattcccttttcggaaacgcgcggctacgtgaaaaacgttctggcctatgacgcttactatcgccactttatggggcagaaagaggccttaatgagcgactctgagtggcagcgacggtattaatgcagacgggttatgttatcatttgtactcgtgtaacagtacaaacggcggtataacatgacccagcattccccttattcatcggctatcgccgaacaacgtaatcaggagtggcttcgttttgtggagttactccgtcaggcatatgcagaggatctgcatctgcctttattacaactgatgcttacgccggacgagcgtgaagcgctgggaacgcgcgtgcgcattattgaggagttgttgcgtggcgaaatgagccagcgcgagttgaaaaccgagctgggggcgggcatcgccaccatcacgcgcgggtcaaacagcctgaaatccgcgccggttgaactgcgtcattggcttgagaacgtactgctgaaaaacgcctgatttgctcgtaggccggataaggcgaagcggccatccggcaacatcgccgcgaaatgcctgatggcgctgtgcttatcaggcttacaatatagcgcaaataattatcgatacaccgcgttatgaaacgggctgagcgccaggatcaccgcctggtagtaaacgctggagcgcgttaattttccggcggtaaatacgccaatggcgccctctttacgaccaatctcatcaatacctgtgtactgcgacattaccgggccaagcgcttctccctggcggactctgtcgagaatgacggcgggcagcggtagcgtggccgatcgcgcttcaccgcgctgaacgccgttatcaatcaccacccaactgaaggtggcgtcatcgtcaattccggcttcaatggctacccagaaatcagcttgtggatgcaggcgtcgcgcattatccacgcgatttcgtgcgccagcacgcgtttcctcgcttccgaagggctgctccggtacgccgctctcgacggcgacgggcgtaatatggcacgatccttcgccgaaaatctcttcaaatgcctgtagaattgcctgaattttggcaggattggtggtcgcagagataacctggtgcataattaagctcagttttaaaaatttatcgcagtataacggaaaaaaaacatgttacaggtataccttgttcgccacggtgaaacgcagtggaacgccgagcgacgtattcagggccaatcggacagtcccctgacagcaaaaggcgagcagcaggccatgcaggtaggagaacgcgcccgtagcctcggcatcacccatatcatcagcagcgatttaggccgcacaaaacgcacggcggagattatcgcccaggcgtgcgggtgtgatatcacctttgactcccgcctgcgcgagctggatatgggcgtgctggaaaagcgccagatcgattcgctgacggaagaagaagagggctggcgtcgtcagctggtcaacggcacgcaggatggccgcattcccggcggggaatcgatgcaggagttgagcgatcgcgttcatgccgcgctggcgtcctgtctggagctaccgcagggcagccgacctttattggtcagtcacggtatcgcgttgggctgtctggtcagtactatactgggactacccgcctgggcggaacgccggttacgtttgcgcaactgctctatttcccgcatcgattaccaggaaagtcagtggctggcgtctggctgggtggtagaaaccgcaggggacgtttcgcatctggacgcccctgcattggatgagctacagcgttaacggcgaatcgggatcagaaattcgcagcgcaggttgatagggcgatcgccggttttggtatcttctgacgggtagtatcgctctatatcctgtcctttacgacgggtcagattcagcattggcatacaggtgccgtaaacggtcaggataaaatcctgcacgccggttcctaacccttcataggtgaacatgacgtattcaccaccctgcaacagcacgggatgcgccgactgaacatagccatcggcctgctcttgcggcagtgcggtggtatagaatacttcctgctcatcgtctttctccatgctggggcgcgtttcattaagcccataaagcactggcggaatagttggcgaatgaccgaggaaatcatgccagaattgcacgcgcatttcgtggcggaagtcggaaatctgttccagcgagcaggaatagctctgcgtgacgccaaggagcggcgtatcttccagcgtaacgaactgatgttccggcacggtaaactcgcccagccgtaatggcgggcgaatgccaaaggcgctccattccgaggagcggcgatacagcgctggcgtctgggaaaactgtttcttaaaggcgcgcgtaaaggtttgctgagaatcgaagcggtactgaagagcaatatccagaattggacgcgcggtcaaacgcagcgccactgctgatttcgataaacgacgggcgcggatgtaagcgccaatggcgtggcccgtcacgtccttaaacattctctgcaggtgccacttggaatagcctgcttttgccgccacattgtcaagtgacagcggctgatccagatgaccttccagccagattaacaggtcgcgaattatgccagcctgatccataaaatatccccatcctttcaacaacgagcacccgatatcaggtaagaggataatagcattttttgttcttttagcattcagtgttttttttgagcttaaatgctttttttaggcaacgtgacaggtaattattctaatcctgtgatctataaccattttattttagaatgtctaataattacgcaacgtaacttttatgaatggtaacaatatgaaatacaagagcttagtacttttctcaattttgttgctgctggggcagagcgcccgcgcggaacaaattggttcagtcgatacggtatttaaaatgttcggtcctgaccataaaatcgtggtggaagcttttgacgatcctgatgtcaaaaacgtgacgtgctatgttagccgggcgaaaacgggcggcataaaaggcggattggggctggcggaagatacgtctgacgccgctatctcttgccagcaggtcgggcctattgaactgagcgacaaaattaagaacggcaaggcgcagggagaggtggtgttcaaaaaacgcacctcattgatatttaagtcattgcaggtcgtgcgtttctatgatgagaaacgcaacacgctggcgtatctggcctactccgacaaagtagtcgacgggtcgccgaagaacgccatcagcgcggtgccggtcatgccgtggcgacaataacagggaaagagtatgcagcaaccgcaggtctggttagtcgaggatgaacagggaatcgccgatacgctcatctacaccctgcaactggaagggtttaccgttgagctattcgctcgcgggctgcccgcgctggaaaaagcgcgtcagcaacggccggatgcggtgattctcgatgtgggactaccggatatcagcggctttgagctgtgtcggcagttgctggaacgccatcctgcgctgccgattcttttcctgactgcccgtagcgatgaagtggatcgattgcttggtctggagattggcgcagatgattatgtcgccaagccgttctcgccgcgcgaagtgagcgcccgcgtgcgcacgctgctgcgccgggtgaaaaagtttgctgcgccgtcgccggtggtgcgtaccggacattttgaactcaatgaaccggcggcgcagatcgcctggtttggtacgccgctctcgctgacgcgttatgagtttctgctccttaaaaccctgctgctgtcgccggagcgcgtgtactcgcgccagcaattgatggatattgtctggtctgatgcccaggagaccttcgatcggacggtcgatacacacatcaaaaccctgcgcgctaaactacgcgcgatcaatccggagctctcgccaattaacacgcatcgtggaatgggatacagcctgaggagcgtctgatgcgcatcggaatgcgtttgctgctgggctactttcttattgtcgccgtcgccgccgtgtttgtgctgtctatcttcgttcaggagataaagccgggcgtccgccgcgcgacggaagggacgctgattgacaccgcaacgctgctggcggcgctggcccgcgacgatctcctttccggcaacccgactgacggccagttggcgaaggcattcgcccaactgcaacatcgcccgtttcgcgccaatatcagcgggatcgtcaaagtgcgcaatgaataccatgtctacatgacggatgcgcaggggaaggtgttgtttgattcggaaaacaaagcggtggggcaggattattctcgctggaatgacgtctggcttacgctgcgcggacagtatggcgcccgcagcacggcaaaagatgctgccgatcccaatagcaccgtgatgtacgtagccgcgccgataatcagcgatggacggattatcggcgtcctgactgtcggcaaaccgaatgcggcaatggcgccggtgattaagcgcagcgaacggcgcattctgtgggccagcgccgttttactgggaattgcgctggcgattggcgcggggatggtctggtggattaaccgctccatcgcccggttgacgcgctatgcggattccgtcaccgaaaaccgcccgcttgcgttacctgcattaggcagcagcgagctgcgtaaactggcgcaggcgctggagagtatgcgcattaagctggaaggcaagaatgagattgagcagtatgtgtatgcgttgactcatgagctgaaaagtccgctggcggcgatacgcggcgcggcggagattctgcgtgaaggaccgcccgcggatgtggttacccgctttacagagaatatactggcgcaaaatacgcgaatgcaggcgctggtagaaaccctgctgcgccaggcgcggctggaaaaccgacaggatatccctctcgcgccggttgctgttgatgagctatttacgcagcttagcgaggcgcgcagtattcagttggcggcaaaaaagatcacgcttactctacggccttcctcgctggttgtcgtcgccgacgcggagcttctggcgcaggcgttgggcaatgtgttggacaatgccatcgactttacgcctgaaaatggcgttatcacattaagcgctcagccgatgggggagaaagcgatcctgcaggtgacggattccggctgtggtattcctgattttgcgctgccgcgcattttcgaccgattctattcgttgccccgtgaaaacgggcgtaaaagcagcgggcttgggctggcgtttgtcagcgaggcggcgcggctcctcaacggtgaggtgacgttgtgcaatcgtcccgaaggcggcgtgctggcctcgttgacacttcaccgtcacttcacataacttcaaattctccccacatcgcgttcttacactgctggcattgcaaaggagaacgctatgttgaaatcccccctgttgtggaaaatgattacgttaggcggcgccatgatcctgctgttaattcccctgatgatggtacggcacaccatcgtggagcgtgctgattatcgaagccatgtagaagccgctattcgtcagagtaccagcggcccacaaaaggttgtcggcccgctggtggcgattccggtgacagagctctataccgtgctggaagaggagaaagaggtccagtataagcgcagctatctctatttttggctgccggagtcgctattggttgaaggcaatcaaaacgttgaagcgcgaaaaataggtatttatcaggggcaggtgtggcataccgatatggcgataaaggcggagtttgatgtggcccgtctgcatgagctgaacagaccgaacattacccttggaaagccctttatcgtcgtgggcgtcggcgatgcgcgcggtatcagcgcagtaaaagcgccgcaggtgaatggtgaaacgctcactgtagagccggggaccggcttaccggaaagtagagagggcattcatatcccgctgccggacagtcagtgggcgacgcgcaacctgacgttggatatgtcgctaaatttaagcggaaccggcagcttttcactggttcccgtcgggcgtagcagtgaaatgaccctggccagtaactggccgcacccaaattttgtgggggattttcttcccggtaaacgcgaaatcagcggttcaggatttcaggcccagtggcaaaccagccggtttgccacgaatctcggcgaacagtttgctgatgcgcaaaaggtggattgggacaacttaccggcgtttagcgtcgctgtatcgacgccagccgatcagtatcaactgacggacagagcgacgaaatatgccattttgttgattacgctaacgtttatggcgttctttgtcttcgaaaccctgacggggcagcggttacacccgatgcagtatctgctggtggggttatcgctggtgatgttctacctgctgttgctggcactgtcggaacatatcggtttcacgccagcctggatcgccgcaagcctggtgggcgcgttgatgaatagcgtttatttgcaggcggtgctgaaaggatggcgcaatagcgtgctgtttacgttagcgttattggcgctggatggcgtgatgtggggattgctgcgttcggaagatagctcgttgcttctgggtaccggcgttctgctactggcgcttggcggcgtgatgttcctgacgcgccatctggactggtattcgctctcttgtcagcaacgtaagtcattaccgccagtaaaagatgacgaattacgtttgtggaaataaatctaacgggcgcgcgcgttaacgttttcccgcgcagcgccagaaactgtgatgccgttagttataggtcaggtttaatgttgccgtggcattcgcttgcccggccgttaccgtggcggcggttttatagtagcgcgcgctaattttcagggtggtcgacatattcatggttccgccgttaaccgtctggctgccatcggcattggtggtaatcgtgtgagtaaagagatcaattttttgattgattggcaaactgccggtaaagaaaccggcgtccggcgcctgaatacccaactgtacgccaacgccggttgcgctggttggcgcgctcgcattgctcaactggatgactgaattatcagggttatttccgctggccggttgggcgcttaacgatgcggaaatagcggtgccttgttcgcaggtcaataggatatcctgctcgcctgtgcccgcggtttgactgttagcgaaactgcctaaattgacgctgcctaaatccacggtgatggcaggtgtttctacccgacatcccatcgctttcataatcaattgcgtattccccaaatacagatgggtcaggatatcgccgccggagtcttccgttgcgctatcgcgaaaagatacgcgcgccagtgggctttggaatgtcgcggtaccggaggtgatcggaccgcctaaggcgaccagttcaacattgtaggcgggagccatcgcatggtgtgttttattgccatcgccattatggtaggtattatcgattggcatgacattatcgtaagggccagcattcgtttgggttttaatcgcaacgcccacgccggaaatcccggtgctaaataccggcgtgttgttcccgtcattcgcattgattgtcgctgatgtatttgactgcgcgctaccgggttcatataaaaaaccgaccttataatcgcgactacagccatccattgtgacttcggaggtggaaacccagcccgattgccacaacacctcgcctgcggtataggcgtggctatccaccacaagctgcgacggcggggtgatagtgatcgcgccttcattaccggaacgtttacaggaggcgtaactatgaccggaatacgcgaacagcagaataagcgccagatataaccttctcatgaaaaattcctgcttttataccaggtgaaatagaaagatgttattgccatgcaatagtgatcgtcacaacggacgtgaaatcccctgccgtgacttttccgtgcggggtatacatccttgcggcgacaggcaaattggcttcatgggtattactgttgatatccaccgtgtaagtgacgttgttggccagattgaccagacttttaccgtccaggttaaaaagctgtaatcctaaatcctgcgccggattggccgcgctgtttgcataaatcgcagaagcataatttggatcgggataaggtacgccgttaaatgaaatcgcggcttttgtggtcgttgccgggcaattcgtcatttttatggtgaaaggaatggtggcggtattgccaccggccacggcgatatccgcccgggcatattgtccaagagagagcgtgtcggggaccgtcacggtacacggatcggcataaattaatcccgtaacgttaatgcctacggcatctgcggtattgtatgccgcgctgatcgagggcgaccataatgccagacccgtgaacgttaacagggcggctaatgcagcaaatctgttcatattcatcttttatcccaccagaatcactggcattgctcgtgtaagatttctacgccagaagcggagggggagctcggtatacgataagagacctgacactggtctgctgctgttggtccccacttcactaataaccgcccttgtttttccagtccggttaaccaggcctgccccgcatcaccaacaaaactgctgtgattgtctggttttgttaaagacgagacggtcgcgccaaaaggaacaggaagattgtttatgcgggttaataccatcaatgccttgtaaccaatattggttttatattcagccctgaccaccgcgccacgggtaggcaccagcgttttactggtatcaatgagctcaatattttttctaatgcccgtcgtatctaaagagacttcattacgatggtaaggcgaagcataaggtacgacggcataaccccgaaaatcggtgtccacgcccgtttcgttattcacggggacacccgctgcgccaggggctttaaccaatatgatggtgtcgtccattggctgggatagtgtcaggccatttcgatgtaacagtacgccgccctgaacgccataattcaggcgacgcatatgattatcgtagctatatccgccgttaatatccgcatacgtcccgttataggttgcgctcacattaccgctggtggctttctcttgagaggaataaccttcctgaacgctccatgagagatttttctgtgccagcgctgttccgtttaaaccgacagtatgcgtggtatcgccgtctttcgcggagttcatattgtaggtggcatacgttgacggcataaaggcatctaacggaatactaatattgattgaaatttgctggtcattactgtcttccgtatcgtcgtcttcatcctgagaattatcggcgttcagcgtataagaatagttaatgccatagcttacgttatgccatgtgttgttatagccaatacctaatgatgtggtatgagtgtcattccagtaatcttcattatataaagtgagtgaaatggaaccgtagataatgtcttgcgataacgacaggtcggtgcgattgcggacatgatcatagtgactattatcgctataggtatccagcacatcctcaagagcgtagtaatctttggtcgaataacggtagccggcgacagtgaaattggtgcctgttgactgaatatctttgctgtaacgaatacgccaggattgtccggtaagcgtatcgctaaccacatcgcctgctttaatttttgaccatgagttggtgacgtctaaagacaatgcgcccagatcgccaaggtttaagcctgtcccgatgagcgccgcatgataaacatcattgctcagcgtactctctattccgccataggcggttatgccgcctgctaatccgtataaggccgtcagttcagcgaagttctgttgcgcggaatgcgtatctgatgaacgcgtgcggcctaccgtcaggtcgtatttcaggtggccttcacgctgtaataccggaacgctggcgtagggcacaatgaaatgctgttcagaaccatcggattctttgatggtgacgtacaggtcgcccgaaccgccggttggataaagatcgttgatggcgaatggacccgccggaacgttagttttgtagatggtataaccgttttgttcaacggttacctgcgcgctgcttttggccaccccgcgaatgaccggggcgaaccctttcatactgtccggcaacatatcgtcatcagaagagatctgtacgcccttaaatgaaatactgtcaaagacgtccgcgggcgtgttattttccccggcgatcagctgtccttttaaaaattcgatatcgcgagaaacataggtgtaggcagaatcccagctattttgcccatcgctatcatgattccaggttgagtagttacgaaaacgccatgcgccaatgttaataccagggcgcaggttagcgtattcgctattttccgtccggttttcatcaatatcgtgatcctgcgatccggtaaaactgtagttcagcaaaaaagcattaatgccttcatcccattcgctggtagggacgaattctcgcgggtcggcgatcaacgcgatttgagggatcgctaaatccagccggttaccgatgacattaaactttgctacagcgccagccagcagactaagatcggtacacccgtttgggtcatttttaagctcggggaagttttctgtttttacgccccactgcttgagttgttcaacgctaagacacggctgtagggagagcttattatctgctgattttttatttttaaaggcaatattttttgtttcaacactggtgttattaatataaatatcaacattataggtgccttctgcctgcccccccttttcgaaaaccgatagatcgacattctccacgcccggttcatcattttccaacgataatggattaaaatgatcatgcgctaacgctggttttatggaacagcatataaagagaaacgataacgctaattgagaacggggctctactctggagaattgcacagtaaaagtcctgaaagggtaaaagtaaaatgaagtcgttaatggctagaatgaaccggaatgcggctctaaactcatcccataatcgctgattaatcgccacgttaccgtgccatgaggggcggcagtagaacccaatttaaatgacgctgatgattttggcggaacgaaggtcgctgatttcacttcatggctgttaagcgtcacactggcaaagttcatataatagggagtggggttatttacggtaataacatcacctgccgtctgccattttaattgttggctctggctatcaggcgttgattttgttaatgctggcggtcgatatataagctttatttgggtattaatggagatttccacgcggttcgcggaggcattatcatcaatagaaggaatacccttaatattgagccagtacatagactcccgatctgcaggtaggggggcgccagagcgaataacccgaatactgttcttttgcccggcatcaaggcgaaaaagaggcggggtgataataaacgcctgcttatttgtgacctggggatcggcaaccgataaccatgactgaacaagattcgctttgctgtctttattctctacattgattgacgactcatcattattgccgtcgaaaaccagtcgggttccgccaacaacaatgctggcatgggcaacatggcttgtcagtaatacggccaacacggatttctttatgtgtttcattttttactctgtaaagatgttttacgctatggactggcatcctgcctgtccacatcaggatgagaatgccttactgatacgaaacggtatacgtaacctgagtgctaacatctccaccggttacggttgcggaaccatcgtttgccatggcggcgtaataggtaaagtctgctgtcgagccgtcggttggcaggtttactgcggcatcatccgtgttatctgtcacatcgctatgtgaagcgttctgaatagaaataccgacacccgcggcgcccgtttccgatccttcgtccgcgtttttgaagtacgttgggttagaatcatctgttgcgccgtggaagcggaacatggcttgggttggtacgccagtccctgcttccgggcagctaaccaggcttacggtaaacggcacgtaatcggttgtggcgcctttttccgcgatgcgttctttgctgtaattacccaaatcaatggtggtatccgtggagccattcacctgaaccgtacacgcctgatcgtaaattttgccattgaacgtaatcgtgttctgggcaaataccggtgtggatgctacggcagttaacattgccaggatgattattttcttattaaacatattaattgttgcctgattctattcgctgaaaaataaagatagccatataaaataaaatattatattttactctgtatgcgcttctttctgttctgtagataagcaggcggctattctacgtatatcaactatgaactcaataaaaattctgatgcaatattgaacggcagtccagtttcggacccggtaacaaagtttaataaaataccactaaagaagtatggttgatgactggatttatagagcaagatctcttttttgataatagttattatttcctggaggatttatttaactctatattgctttatttttaataatatacgacgcttgtccgtttaaaatgaaaccggcaggtttcgaagctctaacagtcttccatgcagtatttttatatagtcccccgcttttagttctgaaagtacctgcatgatacggctgcgtgaaagcccggttctctgctgtatgaagttctgtgcattgatctcaaatcgtgagctttcaggatacgaccacagttcaagtaacagcgcttttatctggctataggcgtcctgcccgataagatttctgtcacggttagtcatgaaagcaatgcggtacatcaggatgttcgaaatgtcacgccagagatgcttttcatcagctatttccacaaaatcttttactgggacaggataatattcacaggtggtttcggcgataaaaaagacgtctgaattctcttctaactggtataagtcagcataggcatctacaaggcctaaaatcattggtgagacaccgcagcccattacaatgctgtcgatacgccgacatactttaatagcgcctttagtgattaacaggatgtgggattgattatcaatcttgatatccagtgttttaccggctgtaatagtgacaggggagatgttttgaataacgtgccgatgaatatttaaaatggcttgcaggtttttttctttccctgtgggacgatacacattcccgccgtttaactgcttcatatcttccccattattatggctgataaagtggttgactattaaaaggtaaacataaatttaatattcacttaaaattataattaagtaaattaaaatagccaacaagaatatttaagtcaatgtattcaccttatcaatgcatgagcgacaacgctgtttgtaaggttaaccatagtaaatgtgatgattttatttgcaatcattttatgacagctatcataggtaccgtgcttaacgagcgcgtagagcgtacaggatagcgaagcgatgaacatcgctattggaggatacgaatgagagaaaagtacaaaatgcaggcgggcggcgttttactgagcgaaatcgccgcctgccggaactcctcccggcgggagccataagcggttagcggtactggacgatcaggctttgaatctccggatgatcttttaacgacacgtgccgtaccgtggcgattccattcatcaacgaaatagcgtttccagacggtgtggcgactgtctgcaaatgggggatattattccgcaaacatgatacctcgatattgcgatcgtgaggcgcaagattacaaccatattcgacaatctggcctttgaaatgaataacgcctgcggagaccggcgcggtagcagccagcgcggctgatgaagctgacatcgctgcacaaaacaggtagcagcataatggtgattttttcatcctttgaaacctcacgtcctgtgagcatccccttattttttggggactaacaaatcccgtgtattactctttaatgtaaatacacaaactaccttaactttcgcaagctgagataaacagcgctatacgacaatttttatgtaaaagagtacgtcataacggcaggtcaggagggaaagcgaggccgcttagcggaagggggacataagaaacagccagtaagaataacttaccggctgtttttacagtttggcgcctgggccgaattaatcctgcaggtcgccgcagaagcgataaccttcgccgtgaatggtggcgatgatttccggcgtatccggcgtggattcgaaatgcttacgaatacgacgaatggtaacgtcaacagtacggtcatgcggcttcagctcgcggccggtcattttcttcaacagctctgcgcgcgactgaattttgccagggttttcgcagaagtgcagcatcgcgcggaactcgctgcgcggtagtttatactgctcgccgtccgggccgatcagtgaacgactgttgatatctagttcccaaccgttgaacttgtagctttcaacgctacgacgctcttcgctgacggtacccaggttcatggtacgggacagcaggttgcgggcacggatggtcaattcgcgtgggttaaacggtttggtgatgtaatcatccgcgccgatttcgaggccgagaattttgtcgacttcgttatcgcggcccgtcaggaacatcagcgcaacgttagcctgttcacgcagttcacgcgctaacaggagaccgtttttccctggcagattgatatccatgatcaccaggttgatgtcatattcagagaggatctgatgcatttccgcgccatctgtcgcttcgaatacatcatagccttccgcttcgaaaatacttttcaacgtgttgcgtgttaccaactcgtcttcaacgataagaatgtgcggggtctgcatgtttgctacctaaattgccaactaaatcgaaacaggaagtacaaaagtccctgacctgcctgatgcatgtcgcaaattaacatgatcggcgtaacatgactaaagtacgtaattgcgttcttgatgcactttccatcaacgtcaacaacatcattagcttggtcgtgggtactttccctctggacccgacagtgtcaaaaacggctgtcatcctaaccattttaacagcaacataacaggctaagacgtaccggacacctaataaaactacgcttcgttgacatatatcaagttcaattgtagcacgttaacagtttgatgaaatcatcgtagctaaatgctagctttcatcacaaatttgcaatattccaactagttacgtaagccaactaataaatgtgatgaatccaaagaacaggatctattttaaattaaattatcctaaataaacagtaggataacgatgttctgttaacataaacagcaatagtacagatacgcaatagtgtagcgtcttttacgaaatcaaaaatgctttttcagtgatatcagttaaaattttgtaaatttgcgaagcgtaatatgcttacaaacgccagctaatttcctgtaaattagtcaaaaagagtaatgaaatgcgtgtaacaattgttcttgtcgctcccgccagagcggaaaatattggcgcagccgcccgggctatgaagaccatgggatttactgacctgcgtattgtcgacagccaggcgcacctggagcccgccacccgttgggtcgcacatggatctggagatattattgataatattgaggttttccacacccttgccgacgcactccacgatgtggattttaccgtagcgacgacagcccgcagccgggcaaaatttcattactacgcttcgcccgctgaactggttcccttattacaggaaaaatcacgctggatgcgtcatgccgcgctggtttttggccgtgaggattccggtctgaccaatgacgagctggcgctggcggatgtattgaccggcgtgccgatggcggcggattacccttcgctcaatctgggtcaggcggtcatggtgtattgctatcaattagcaggtttaatgcaacagaccacagaatccgttgatattgctgatgaatcgcagttacaggcgttacgcgcgcgccttttacgcctgctaacgactctggaggcggccgatgaccacaaattaaccgactggctacaacagcgaatcggcctgctgggacagcgagatacggtaatgttgcaccgtttggtccatgatattgaaaaaaaactaacaaaataacgtgctgtaatttttaaaataataagagatt
